(19) United States
(12) Patent Application Publication
(10) Pub. No.: US 2006/0292599 A1
(43) Pub. Date: Dec. 28, 2006

(54) Methods to detect lineage-specific cells

(75) Inventors: Jerome Ritz, Lincoln, MA (US); Catherine J. Wu, Cambridge, MA (US); Ephraim P. Hochberg, (US)

Correspondence Address: FOLEY HOAG, LLP;PATENT GROUP, WORLD TRADE CENTER WEST, 155 SEAPORT BLVD, BOSTON, MA, 02110, US

(73) Assignee: Dana-Farber Cancer Institute, Inc., Boston, MA (US)

(21) Appl. No.: 11/389,543

(22) Filed: Mar. 24, 2006

Related U.S. Application Data
(63) Continuation of application No. PCT/US04/31524, filed on Sep. 24, 2004.
(60) Provisional application No. 60/506,221, filed on Sep. 25, 2003.
(60) Provisional application No. 60/509,594, filed on Oct. 8, 2003.

(51) Int. Cl. C12Q 1/68

(52) U.S. Cl. 435/6

(57) ABSTRACT

The present invention is based, at least in part, on methods to identify and quantify lineage-specific cells. The present invention provides methods of detecting lineage-specific cells in a biological sample, and monitoring the effectiveness of progenitor cell transfer in a subject. The invention further provides methods of determining an effective dose of progenitor cell transfer in a subject and methods of quantifying progenitor cell transfer in a subject. Additionally, methods are provided to identify allelic variants in lineage-specific cells.

### RELATED APPLICATIONS

[0001] This application is continuation of PCT/US04/31524, which was filed on Sep. 24, 2004, which claims the benefit of U.S. Provisional Application Ser. No. 60/506,221, filed Sep. 25, 2003, and U.S. Provisional Application Ser. No. 60/509,594, filed Oct. 8, 2003, the entire contents of each of which are incorporated herein by this reference.

### GOVERNMENT FUNDING

[0002] Work described herein was supported, at least in part, by National Institutes of Health (NIH) under grants KO8 HL04293 and AI29530. The U.S. government therefore may have certain rights in this invention.

### BACKGROUND OF THE INVENTION

[0003] Transplantation of stem cells is a curative option for many hematologic malignancies. Transplantation of cells that have been genetically engineered to replace cells that produce either no protein or defective protein as the result of inherited or idiopathic diseases or disorders, e.g., Cystic Fibrosis, is also proving to be feasible. However, for any cell transplantation to be successful, it is critically important to quantify the level of engraftment of donor cells or transgenic cells relative to recipient or defective cells. Current methods for measuring the relative numbers of donor versus recipient cells are based on DNA polymorphisms that distinguish recipient from donor. These methods provide an accurate assessment of engraftment of donor cells, however, these methods do not provide an assessment of the functional capacity of the donated cells and do not directly examine engraftment of specific cell lineages following transplant. Moreover, these methods require prior purification of cellular subsets which often results in samples that are not representative of the original sample.

[0004] For example, non-myeloablative conditioning regimens for allogenic stem cell transplantation are now commonly used in the treatment of subjects with hematologic malignancies, and since this treatment often results in the establishment of mixed hematopoietic chimerism, a similar approach is also useful in the treatment of nonmalignant disorders, such as sickle cell disease and thalassemia major. In order to apply this approach for these diseases, it is necessary to determine the levels of donor erythropoiesis required to correct hemolysis and reconstitute immune function in order to ameliorate disease symptoms and minimize end-organ damage. The current methods for measuring cell chimerism are effective and accurately measure donor cell engraftment, but do not quantify the relative contributions of recipient and donor erythropoiesis and/or immune function following transplant.

### SUMMARY OF THE INVENTION

[0005] The present invention is based, at least in part, on methods for measuring functional cell engraftment of lineage-specific cells. Accordingly, the invention provides a method of detecting lineage-specific cells in a biological sample by identifying lineage-specific mRNA in a biological sample.

[0006] In another aspect of the invention, the present invention provides methods of monitoring the effectiveness of progenitor cell transfer in a subject, comprising the step of identifying lineage-specific mRNA in the subject.

[0007] In another aspect, the invention provides methods of detecting lineage-specific cells in a biological sample comprising the step of identifying at least one allelic variant in lineage-specific mRNA in the sample. In one embodiment, the at least one allelic variant is in a gene selected from the genes listed in Tables 4, 6, 7, and 8.

[0008] In yet another aspect, the invention features a method of detecting lineage-specific cells in a biological sample comprising the step of identifying at least one single nucleotide polymorphism (SNP) in lineage-specific mRNA in said sample, thereby detecting lineage-specific cells in said sample. In one embodiment, the at least one SNP is in a gene selected from the genes listed in Tables 4, 6, 7, and 8. In yet another embodiment, the at least one SNP is selected from the group listed in Table 9 (see below). For example, the SNP(s) may be contained within a β-globin gene.

[0009] In another embodiment, the lineage-specific cells are hematopoietic cells, e.g., erythroid cells, lymphoid cells, or myeloid cells.

[0010] In still another embodiment, the lineage-specific mRNA is identified by sequencing. In a further embodiment, the sequencing is pyrosequencing. In another embodiment, the lineage-specific mRNA is identified by an array-based method.

[0011] Another aspect of the invention features a method of quantifying donor and recipient lineage-specific cells in a subject following progenitor cell transfer comprising the steps of obtaining a biological sample from said subject following progenitor cell transfer; and identifying and quantifying the presence of one or more donor-derived allelic variants and the presence of one or more recipient-derived allelic variants.

[0012] Still another aspect of the invention features a method of detecting lineage-specific chimerism of a subject following progenitor cell transfer comprising the steps of obtaining a biological sample from said subject following progenitor cell transfer; and identifying and quantifying the presence of one or more donor-derived lineage-specific allelic variants and the presence of one or more recipient-derived lineage-specific allelic variants. In one embodiment, the biological sample is blood. In another embodiment, the biological sample is bone marrow.

[0013] In still another embodiment, the allelic variants are contained within a lineage-specific gene. In a further embodiment, the lineage-specific gene is selected from the group of genes listed in Tables 4, 5, 6, and 7.

[0014] In one embodiment, the allelic variants are SNPs. In another embodiment, the SNPs are selected from the group consisting of those SNPs listed in Table 9. In yet another embodiment, the allelic variants are identified by an array-based method.

[0015] In one embodiment, the lineage-specific allelic variants are expressed by a lineage-specific cell selected from the group consisting of erythroid, lymphoid, or myeloid cells.

[0016] In one embodiment, the subject is suffering from a disease or disorder. In another embodiment, the disease or disorder is associated with reduced levels of β-globin mRNA. In still another embodiment, the disease or disorder is selected from the group consisting of: hemoglobinopathies, hemolytic anemia, hereditary elliptocytosis, hereditary stomatocytosis, Chronic Granulomatous Disease, Chediak-Higashi syndrome, myelodysplasia, acute erythroleukemia, Kostmann's syndrome, infant malignant osteopetrosis, severe combined immunodeficiency, Wiskott-Aldrich syndrome, aplastic anemia, Blackfan Diamond anemia, Gaucher's disease, Hurler's syndrome, Hunter's syndrome, infantile metachromatic leukodystrophy, autoimmune disorders, osteogenesis imperfecta, myocardial injury-syndromes, Cystic Fibrosis, hemophilia, Gaucher's disease, diabetes mellitus, organ failure or injury, e.g., cardiac, brain, lung, liver, renal, prostate or pancreas organ failure or injury, and cancers associated with oncogenes, e.g., breast, prostate, or colon cancer.

[0017] In another embodiment, the disease of disorder is a cognitive or neurodegenerative disease or disorder, e.g., Alzheimer's disease, stroke, dementias related to Alzheimer's disease (such as Pick's disease), Parkinson's and other Lewy diffuse body diseases, senile dementia, Huntington's disease, Gilles de la Tourette's syndrome, musculoskeletal diseases, multiple sclerosis, amyotrophic lateral sclerosis, progressive supranuclear palsy, epilepsy, or Jakob-Creutzfieldt disease.

[0018] In still another embodiment, the progenitor cell is a stem cell or a transgenic cell.

[0019] Another aspect of the invention provides a method of quantifying progenitor cell transfer in a subject comprising the steps of: (a) obtaining a biological sample prior to said progenitor cell transfer; (b) obtaining a biological sample following said progenitor cell transfer; (c) identifying and quantifying lineage-specific allelic variants in said biological sample obtained in step (a); (d) identifying and quantifying lineage-specific allelic variants in said biological sample obtained in step (b); and (e) comparing the quantity of progenitor cell transfer from step (c) and step (d) thereby quantifying progenitor cell transfer in a subject.

[0020] In still another aspect of the invention, a method is provided to determine an effective dose of progenitor cell transfer in a subject comprising the steps of: (a) obtaining a biological sample prior to said progenitor cell transfer; (b) obtaining a biological sample following said progenitor cell transfer, (c) identifying and quantifying lineage-specific allelic variants in said biological sample obtained in step (a), thereby quantifying progenitor cell transfer in said biological sample; (d) identifying and quantifying lineage-specific allelic variants in said biological sample obtained in step (b), thereby quantifying progenitor cell transfer in said biological sample; and (e) comparing the quantity of progenitor cell transfer from step (c) and step (d) to therapy outcome, thereby determining an effective dose of progenitor cell transfer.

[0021] In one aspect, a method is provided for detecting lineage-specific cells in a biological sample, comprising the steps of: (a) isolating mRNA from said biological sample; (b) reverse transcribing cDNA from said mRNA; (c) amplifying said cDNA; and (d) identifying lineage-specific cDNA in the sample.

[0022] Another aspect of the invention provides a method of detecting lineage-specific cells in a biological sample, comprising the steps of: (a) ascertaining at least one lineage-specific allelic variant in a target sequence; (b) isolating mRNA from said biological sample; (c) reverse transcribing cDNA from said mRNA; (d) amplifying said at least one allelic variant from said cDNA by a template dependent process; and (e) identifying the at least one lineage-specific allelic variant in step (a) in said sample, thereby detecting lineage-specific cells in a biological sample.

[0023] In one embodiment, the amplification of said cDNA comprises the amplification two or more allelic variants.

[0024] In one embodiment, the at least one allelic variant is in a gene selected from the genes listed in Tables 4, 6, 7, and 8.

[0025] In one embodiment, the amplification of cDNA amplifies a polymorphic region of a gene or fragment thereof selected from the genes listed in Tables 4, 6, 7, and 8. In another embodiment, the amplification of cDNA amplifies a β-globin gene or fragment thereof. In a further embodiment, the amplification of the β-globin gene or fragment thereof utilizes the primers set forth as SEQ ID No.: 3 and SEQ ID NO: 5. In another embodiment, the amplification of the β-globin gene or fragment thereof utilizes the primers set forth as SEQ ID No.: 6 and SEQ ID NO: 8.

[0026] In still another aspect of the invention, a kit is provided to identify lineage-specific cells in a biological sample comprising, (a) primers for the amplification of lineage-specific mRNA; and (b) instructions for use of said primers to identify lineage-specific cells in said biological sample.

[0027] Another aspect of the invention provides a kit to monitor the effectiveness of progenitor cell transfer comprising, (a) primers for the amplification of lineage-specific mRNA, and (b) instructions for use of said primers to monitor the effectiveness of progenitor cell transfer.

[0028] In one embodiment, the primers for the amplification of lineage-specific mRNA are set forth as SEQ ID No.: 3 and SEQ ID NO: 5. In another embodiment, the primers for the amplification of lineage-specific mRNA are set forth as SEQ ID No.: 6 and SEQ ID NO: 8.

[0029] In still another embodiment, the lineage-specific cells are hematopoietic cells, e.g., erythroid cells, lymphoid cells, and myeloid cells. In another embodiment, the progenitor cell is a stem cell. In a further embodiment, the progenitor cell is a transgenic cell.

[0030] A further aspect of the invention features a method for determining the clinical outcome of a progenitor cell transfer in a subject comprising obtaining a biological sample from said subject and identifying lineage-specific mRNA in said biological sample, wherein a substantial amount of donor-derived lineage-specific allelic variants selected from the group in Table 7 is an indication of poor clinical outcome and a substantial amount of recipient-derived lineage-specific allelic variants selected from the group in Table 7 is an indication of favorable clinical outcome.

[0031] Yet another aspect of the invention features a method for determining immune reconstitution in a subject following progenitor cell transfer comprising the steps of obtaining a biological sample from said subject and identifying the identify of at least one lineage-specific allelic variant in said biological sample, to thereby determine immune reconstitution in a subject.

### BRIEF DESCRIPTION OF THE DRAWINGS

[0032] FIG. 1 is a schematic for the detection and quantitation of erythroid-lineage specific chimerism using RNA pyrosequencing compared with the assessment of genomic DNA chimerism by DNA pyrosequencing.

[0033] FIG. 2 is an image that demonstrates that sequence specific PCR primers for the β-globin gene amplify genomic DNA (GDNA) from cells of various lineages, including peripheral blood mononuclear cells (PBMC) and EBV-transformed B cell lines, but only amplify cDNA derived from erythroid lineage cells. GAPDH was amplified as a positive control.

[0034] FIGS. 3A-3B depict pyrograms of β-globin gene mutations and polymorphisms. (A). Pyrograms generated from sequencing the complementary strand of the β-globin gene around the sickle mutation (actual sequence: C A/T CAGGA). Pyrograms of homozygous sickle cell disease (A/A), sickle cell trait (A/T) and normal donor (T/T) are shown. (B). Pyrograms generated from sequencing the complementary strand of the β-globin gene surrounding the H3H polymorphism (actual sequence: G G/A TGCACC).

[0035] FIGS. 4A-4B are graphs that depict the quantitative assessment of chimerism by pyrosequencing. (A). Plasmids encoding normal or sickle β-globin were mixed in varying ratios and amplified with primers specific for β-globin cDNA. The expected input frequency and measured output by pyrosequencing were highly correlated (r²<0.968). This experiment was repeated 4 times, as represented by the different symbols. (B). cDNA derived from a normal donor homozygous for β-globin H3H polymorphism was mixed in varying ratios with cDNA of another normal donor heterozygous at the same loci, and the mixtures were amplified with primers specific for the region around the β-globin H3H polymorphism. Input mixtures correlated well with output percentages measured by pyrosequencing (r²<0.9487). This experiment was repeated 3 times.

[0036] FIG. 5 shows graphs that depict the changes in blood hemoglobin following transplantation measured by hemoglobin electrophoresis. Percentages of hemoglobin-A1 and hemoglobin-S were determined by hemoglobin electrophoresis for Subjects 1 and 2 during the first 3 months after transplantation. The shaded region represents the period during which normal donor RBCs were transfused. Results are compared to donor values indicated at the far right.

[0037] FIG. 6 shows graphs that depict a comparison of hematopoietic DNA chimerism with erythroid lineage RNA chimerism following transplantation. Hematopoietic DNA chimerism was determined by conventional STR analysis and DNA pyrosequencing for the sickle mutation. Erythroid chimerism was determined by pyrosequencing for the sickle mutation in β-globin RNA.

[0038] FIG. 7 shows graphs that depict serial measurements of donor chimerism in genomic DNA and β-globin RNA after HSCT.

[0039] FIG. 8 depicts genes in the merged dataset derived from expression datasets of normal B, T, NK, macrophage and blood-derived dendritic cells, clustered on the basis of RNA expression levels (darkest gray-high expression levels; lightest gray=low expression levels) and each hematopoietic cell subset could be clearly distinguished on the basis of expression of a defined set of genes.

### DETAILED DESCRIPTION OF THE INVENTION

[0040] The present invention is based, at least in-part, on the discovery of methods to detect lineage-specific cells. In-one embodiment, the present invention provides methods to accurately identify, detect, and quantify a functional cell, e.g., a lineage-specific cell, e.g., a transfected cell or a stem cell. For example, the present invention provides methods to identify, detect, and quantify the engraftment of donor cells that give rise to hematopoietic and non-hematopoietic lineages following stem cell transplantation. The present invention also provides methods of determining the clinical outcome of a subject following progenitor cell transfer.

[0041] The transplantation of autologous or allogenic bone marrow-derived stem cells and/or hematopoietic stem cells, e.g., bone marrow transplantation (BMT), has been used extensively to treat subjects with malignant hematological diseases or disorders, e.g., myeloid and lymphoid malignancies, e.g., as classified by World Health Organization (WHO), following myeloablative combinations of high dose chemo-radiotherapy. The transplantation of stem cells was considered a means to overcome the myelotoxic effects of the chemo-radiotherapy providing reconstitution of hematopoiesis. Over the years, however, it was recognized that there was a persistence and/or reappearance of the recipient hematopoietic cells in addition to the donor hematopoietic cells following myeloablative allogenic BMT resulting in hematopoietic chimerism. It has become clear, in fact, that the immune reaction between donor-derived immunocompetent cells and host-type tumor cells was an important therapeutic event and accounted for better anti-tumor effects, e.g., graft-versus-leukemia (GVL) and graft-versus-tumor (GVT) effects, induced by allogenic BMT compared to autologous BMT (reviewed in Khouri, I., et al. (2002) Cancer Treat. Res. 110:137).

[0042] Myeloablative stem cell transplantation is a curative option for many hematologic malignancies but is usually reserved for younger subjects without serious comorbid conditions, especially graft versus host disease (GVHD) and serious bacterial, viral, and fungal infections due to prolonged myelosuppression and immuno-suppression with conventional conditioning regimens (Ringden, O., et al. (1993) J. Am. Med. Assoc. 270:57). A strategy utilizing a less intensive, non-myelosuppressive preparative regimen that is sufficiently immuno-suppressive to prevent graft rejection and allow engraftment of hematopoietic stem cells and the establishment of hematopoietic chimerism has been developed and used successfully to treat hemotologic malignancies in subjects ineligible for high dose chemotherapy or radiation. This therapy is referred to as “non-myeloablative stem cell transplantation” (NST) or “mini-transplants”, as used herein (Krause, D. S., et al. (2001) Cell 105:369-377; Jiang, Y., et al. (2002) Nature 418:41-49; Wagers, A. J., et al. (2002) Science 297:2256-2259; Sykes, et al., U.S. Pat. No. 6,558,662). Since this method is associated with fewer complications than traditional BMT conditioning regimens and still allows the development of hematopoietic chimerism, this approach is also useful in the treatment of nonmalignant hematological disorders (Reya, T., et al. (2001) Nature 414:105-111) and is sufficient to correct genetic defects of hematopoiesis such as, for example, hemoglobinopathies, e.g., sickle cell syndromes and thalassemia syndromes, or other severe metabolic diseases or disorders, such as Hunters or Hurler's Syndromes (Yeager et al. (2002) Ann Hematol 81: Suppl S16-9), and defects in hematopoiesis or immune function (Balkwill, F. & Mantovani, A. (2001) Lancet 357:539-545; Houghton, J. M., et al. (2002) J. Gastro. Hep. 17:495-502; Schmidt P. H., et al. (1999) Lab. Invest. 79:639-646; Fox, J. G., et al. (2002) Cancer Res. 62:696-702).

[0043] In order that non-myeloablative stem cell transplantation be successful for the treatment of nonmalignant hematological diseases and disorders, e.g., hemoglobinopathies, e.g., sickle cell syndromes and thalassemia syndromes, severe metabolic diseases and disorders, defects in hematopoiesis or immune function, cognitive and neurodegenerative diseases and disorders, and cancer, it is critically important to quantify the level of lineage-specific engraftment of donor cells, e.g., the progeny of a progenitor cell, e.g., a transfected cell or a stem cell, e.g., a bone marrow-derived stem cell and/or a hematopoietic stem cell, e.g., lineage-specific cell detection. Current methods for measuring cell chimerism, e.g., hematopoietic cell chimerism, are based on DNA polymorphisms that distinguish recipient from donor. These methods provide an assessment of engraftment of nucleated donor cells and are, therefore, useful in determining the levels of leukocyte chimerism after transplant. However, these methods do not provide an assessment of the functional capacity of the engrafted cells, e.g., oxygen carrying erythrocytes or functional/reactive immune cells, e.g., functional engraftment, and do not directly examine engraftment of specific cell lineages following transplant. Moreover, these methods require prior purification of cellular subsets which often results in samples that are not representative of the original sample.

[0044] Similarly, gene therapy methods do not quantitate the functional capacity of donated cells or directly examine engraftment of specific cell lineages following transplant of transgenic cells. Current methods rely on the presence of the targeting vector and/or presence of functional protein which does not directly examine engraftment of specific cell lineages following transplant.

[0045] The present invention provides methods to accurately identify, detect, and quantify a functional cell and directly examine engraftment of specific cell lineages, following transplant, with out requiring prior purification of cellular subsets. In one embodiment, the present invention provides methods to identify, detect, and quantify the engraftment of donor cells that give rise to hematopoietic and non-hematopoietic lineages following stem cell transplantation. For example, the use of lineage-specific variants, such as, for example, allelic variants, e.g., single nucleotide polymorphisms (SNPs), allow for the identification and detection of lineage-specific cells, e.g., donor and recipient lineage-specific cells, to assess the functional engraftment of specific cell lineages, as well as the functional capacity of the engrafted cells.

[0046] In one embodiment, the methods of the invention utilize allelic variants, e.g., SNPs, contained within the coding regions of genes which are unique to specific cell lineages, e.g., erythroid, myeloid, or lymphoid lineages, in order to identify, detect, and quantify lineage specific chimerism, e.g., following transplantation, to thereby identify the functional outcome of the stem cell transplant or to determine the clinical outcome of a subject following progenitor cell transfer.

[0047] In one embodiment, the lineage-specific allelic variant, e.g. SNP, is a disease-related allelic variant, e.g., the sickle mutation in the β-globin gene. Because the β-globin gene is expressed only in erythroid lineage cells, the sickle mutation in the β-globin gene may be used to evaluate chimerism in the erythroid lineage, e.g., following stem cell transplantation, in a subject. RNA derived from the recipient may be distinguished from RNA derived from the donor based on the presence or absence of the sickle mutation.

[0048] In another embodiment, the lineage specific allelic variant, e.g., SNP, is a non-disease-related allelic variant. For example, the allelic variant may be any variant, e.g., SNP, provided that the allelic variant, e.g., SNP, is an expressed variant contained within a gene which is expressed only in a specific cell type or lineage, e.g., erythroid, myeloid, and lymphoid lineages. In one embodiment, the SNP is a high-frequency SNP. It is understood that in order to identify, detect, and quantify specific cell lineages following stem cell transplantation in a subject, the allelic variant must be polymorphic between the donor and the recipient, and the recipient genotype at the location of the variant must be ascertained prior to identifying, detecting, and quantifying the lineage-specific chimerism.

[0049] In still another embodiment, a panel of allelic variants, e.g., SNPs, is used to identify, detect, and quantify lineage-specific cells, e.g., in a high-throughput manner. In another embodiment, pyrosequencing is used to identify the presence or absence of allelic variants, e.g., SNPs, in a sample.

[0050] In a further embodiment, the methods of the invention are used to quantify immune reconstitution, e.g., reconstitution of immune cells, such as, for example, myeloid, T cell, B cell, monocyte, natural killer (NK) cell, and dendritic cells (DC), following stem cell transplantation, by identification of allelic variants, e.g., SNPs, contained within genes which are known to be unique to certain cell types, e.g., myeloid, T cell, B cell, monocyte, natural killer (NK) cell, and dendritic cells. Furthermore, various leukocyte populations can also be defined based on their functional activity. Therefore, in a further embodiment, the present invention provides methods for using allelic variants, e.g., SNPs present within functional molecules, to measure chimerism and determine whether effector activity of activated immune cell populations are host or donor derived. The presence of certain functional immune cell populations may be used to predict clinical outcome of a subject following transplantation. Examples of functional molecules include, for example, cytokines and secreted factors that are associated with specific cell subsets and markers associated with general T cell activation, T/NK cell cytolytic activity, Th1 and Th2 activity, DC activation and tolerance induction, chemokines and their receptors, and molecules associated with activation-induced signaling.

Definitions

[0051] For convenience, the meaning of certain additional terms and phrases employed in the specification, examples, and appended claims are provided below. Additional definitions are set forth throughout the detailed description.

[0052] As used herein, a “cell lineage” refers to cells with a common ancestry that develop from the same type of identifiable cell into specific identifiable/functioning cells. As used herein, a “progenitor cell”, e.g., a transfected cell or a stem cell, e.g., a bone marrow-derived stem cell and/or a hematopoietic stem cell, is a parent cell that gives rise to a distinct cell lineage by a series of cell divisions. Accordingly, a “lineage-specific cell” is intended to refer to any of the cells derived from a progenitor cell, e.g., a transfected cell or a stem cell, in the developmental series that ultimately produce identifiable and/or differentiated progeny cells. A lineage-specific cell may be identified based on a polymorphic region of a gene of interest.

[0053] As used herein, a “bone marrow-derived stem cell” is an undifferentiated, pluripotent cell that gives rise to, for example, adipocytes, cardiomyocytes, hepatocytes, osteoblasts, renal mesangial cells, endothelial cells, stromal cells, and/or chondrocytes. (see, for example, Asahara, T., et al. (1997) Science 275:964; Ito, T., et al. (2001) J Am Soc Nephrol 12:2625; Imasawa, T., et al. (2001) J Am Soc Nephrol 12:1401; Grant, M. B., et al. (2002) Nat Med 8:607; Grigoriadis, A. E., et al. (1988) J Cell Biol 106:2139; Lagasse, E., et al. (2000) Nat Med 6:1229; Makino, S., et al.(1999) J Clin Invest 103:697; Murohara, T. (2001) Trends Cardiovasc Med 11:303; Peichev, M., et al. (2000) Blood 95:952; Pittenger, M. F., et al. (1999) Science 284:143; Schatteman, G. C. and Awad, O. (2004) Anat Rec 276A:13).

[0054] As used herein, a “hematopoietic stem cell” is an undifferentiated, pluripotent cell that gives rise to blood cells, e.g., erythroid, myeloid and/or lymphoid cells, particularly highly specialized cells, which take the place of cells which die or are lost. Hematopoietic stem cells, e.g., embryonic stem cells, are unique in that they can both renew themselves, e.g., replicate, as well as create new cells, e.g., differentiate, throughout the life of the organism. Hematopoietic cells can differentiate into cells that are part of any tissue in an organism, e.g., blood cells, e.g., erythrocytes, leukocytes, granulocytes, monocytes and platelets, as well as cells comprising the fixed macrophage population, including Kupffer cells of the liver, pulmonary alveolar macrophages, osteoclasts, Langerhans cells of the skin and brain microglial cells.

[0055] A “lineage-specific erythroid cell” is intended to refer to any of the cells derived from hematopoietic stem cells in the developmental series that ultimately produce an erythrocyte. An “erythrocyte”, also referred to as a red blood cell, is a mature, functional, e.g., capable of transporting oxygen, non-nucleated, biconcave cell that contains hemoglobin, e.g., β-globin. Similarly, a “lineage-specific lymphoid cell” is intended to refer to any of the cells derived from hematopoietic stem cells in the developmental series that ultimately produce a lymphocyte, e.g., T cell or B cell, natural killer cell, dendritic cell, or plasma cell. As used herein, “lineage-specific myeloid cell” is intended to refer to any of the cells derived from hematopoietic stem cells in the developmental series that ultimately produce a granulocyte, monocyte or platelet.

[0056] As used herein, a “T cell” refers to T lymphocytes as defined in the art and is intended to include thymocytes, immature T lymphocytes, mature T lymphocytes, resting T lymphocytes, or activated T lymphocytes. The T cells can be CD4⁺ T cells, CD8⁺ T cells, CD4⁺CD8⁺ T cells, or CD4⁻CD8⁻ T cells. The T cells can also be T helper cells, such as T helper 1 (Th1) or T helper 2 (Th2) cells. The term T cells also include activated T cells and memory T cells.

[0057] As used herein, a “B cell” is cell expressing immunoglobulins on its cell surface. B cells mature into plasma cells which produce antibodies. B cells may also mature into memory B cells that produce the same antibody which is directed against the antigen that stimulated it to mature.

[0058] As used herein, the term “naive T cells” includes T cells that have not been exposed to cognate antigen and so are not activated and are not memory cells. Naive T cells are not cycling and human naive T cells are CD45RA+. If naive T cells recognize antigen and receive additional signals depending upon but not limited to the amount of antigen, route of administration and timing of administration, they may proliferate and differentiate into various subsets of T cells, e.g. effector T cells.

[0059] As used herein, the term “memory T cell” includes lymphocytes which, after exposure to antigen, become functionally quiescent and are capable of surviving for long periods in the absence of antigen. Human memory T cells are CD45RA−.

[0060] As used herein, the term “effector T cell” or “Teff cell” includes T cells which function to eliminate antigen (e.g., by producing cytokines which modulate the activation of other cells or by cytotoxic activity). The term “effector T cell” includes T helper cells (e.g., Th1 and Th2 cells) and cytotoxic T cells. Th1 cells mediate delayed type hypersensitivity responses and macrophage activation while Th2 cells provide help to B cells and are critical in the allergic response (Mosmann and Coffinan, 1989, Annu. Rev. Immunol. 7, 145-173; Paul and Seder, 1994, Cell 76, 241-251; Arthur and Mason, 1986, J Exp. Med. 163, 774-786; Paliard, et al., 1988, J. Immunol. 141, 849-855; Finkelman, et al., 1988, J. Immunol. 141, 2335-2341).

[0061] As used herein, the term “T helper type 1 response” (Th1 response) refers to a response that is characterized by the production of one or more cytokines selected from IFN-γ, IL-2, TNF, and lymphotoxin (LT) and other cytokines produced preferentially or exclusively by Th1 cells rather than by Th2 cells. As used herein, a “T helper type 2 response” (Th2 response) refers to a response by CD4⁺ T cells that is characterized by the production of one or more cytokines selected from IL-4, IL-5, IL[-6 and IL-10, and that is associated with efficient B cell “help” provided by the Th2 cells (e.g., enhanced IgG1 and/or IgE production).

[0062] As used herein, the term “regulatory T cell” or “T reg cell” includes T cells which produce low levels of IL-2, IL-4, IL-5, and IL-12. Regulatory T cells produce TNFα, TGFβ, IFN-γ, and IL-10, albeit at lower levels than effector T cells. Although TGFβ is the predominant cytokine produced by regulatory T cells, the cytokine is produced at levels less than or equal to that produced by Th1 or Th2 cells, e.g., an order of magnitude less than in Th1 or Th2 cells. Regulatory T cells can be found in the CD4⁺CD25⁺ population of cells (see, e.g., Waldmann and Cobbold. 2001. Immunity. 14:399). Regulatory T cells actively suppress the proliferation and cytokine production of Th1, Th2, or naive T cells which have been stimulated in culture with an activating signal (e.g., antigen and antigen presenting cells or with a signal that mimics antigen in the context of MHC, e.g., anti-CD3 antibody, plus anti-CD28 antibody).

[0063] As used herein, the term “anergy” or “tolerance” includes refractivity to activating receptor-mediated stimulation. Such refractivity is generally antigen-specific and persists after exposure to the tolerizing antigen has ceased. For example, tolerance is characterized by lack of cytokine production, e.g., IL-2. Tolerance occurs when cells are exposed to antigen and receive a first signal (a T cell receptor or CD-3 mediated signal) in the absence of a second signal (a costimulatory signal) or by modulation, e.g., upmodulation of an inhibitory signal from an inhibitory receptor, such as, for example, ILT3. Under these conditions, reexposure of the cells to the same antigen (even if reexposure occurs in the presence of a costimulatory polypeptide) results in failure to produce cytokines and, thus, failure to proliferate. For example, tolerance is characterized by lack of cytokine production, e.g., IL-2, or can be assessed by use of a mixed lymphocyte culture assay. Tolerance can occur to self antigens or to foreign antigens.

[0064] As used herein, a “professional antigen presenting cell” or “APC” is a cell that can present antigen in a form that cells can recognize it. The cells that can “present” antigen include B cells, monocytes, macrophages and dendritic cells. As used herein, the term “dendritic cell” or “DC” is intended to include APCs capable of activating naive T cells and stimulating the growth and differentiation of B cells. DCs are lineage negative cells, i.e., they lack cell surface markers for T cells, B cells, NK cells, and monocytes/macrophages, however they strongly express various costimulatory molecules (e.g., CD86, CD80, CD83, and HLA-DR) and/or adhesion molecules.

[0065] As used herein, the term “immune response” includes T cell mediated and/or B cell mediated immune responses that are influenced by modulation of T cell costimulation. Exemplary immune responses include T cell responses, e.g., cytokine production, and cellular cytotoxicity. In addition, the term immune response includes immune responses that are indirectly affected by T cell activation, e.g., antibody production (humoral responses) and activation of cytokine responsive cells, e.g., macrophages.

[0066] As used herein, a “natural killer cell” or “NK cell” is a lymphocyte that originates in the bone marrow and can develop fully in the absence of the thymus. An NK cell recognizes and destroys foreign cells without prior sensitization to it.

[0067] A “transfected cell” is a lineage-specific cell that has been modified, e.g., stably transfected, in vivo or ex vivo, by genetic transfer techniques, e.g., gene targeting, e.g., gene therapy, to carry and replicate exogenous DNA, and whose progeny can be identified based on the genetic material they carry following transfection. “Gene therapy” is a process to manipulate the genome of an organism to prevent, mask, or lessen the effects of a genetic disease or disorder by the introduction of genetic material into the genome of targeted cells in order to correct a genetic defect or to add a new biologic property or function with therapeutic potential. This technique can be used to alter, for example, cellular metabolism, immune response, or sensitivity to therapeutic agents.

[0068] “Bone Marrow Transplantation” (BMT) also referred to as “blood-” or “marrow-derived stem cell transplantation”, “hematopoietic cell transplantation” (HCT), “hematopoietic stem cell transplantation” (HSCT) or “stem cell transplantation” (SCT), is a term used in the art to describe the collection and transplantation of progenitor cells, e.g., stem cells, e.g., bone marrow-derived stem cells and/or hematopoietic stem cells, from a donor and injection into a recipient. Following BMT, donor stem cells, e.g., bone marrow-derived stem cells and/or hematopoietic stem cells, home to the appropriate sites of the recipient and grow continuously along with remaining host and/or recipient cells and proliferate. By this process, newly formed and pre-existing cells (recipient), e.g., lymphoid and myeloid cells, are exposed to donor antigens and antibodies they produce so that the transplant may be recognized as self. The stem cells may be allogenic, e.g., stem cells from a donor who is not immunologically related to the recipient, or autologous, e.g., one's own stem cells. Stem cells, e.g., bone marrow-derived stem cells and/or hematopoietic stem cells, can be acquired from bone marrow, or alternatively from umbilical cord blood, peripheral blood or fetal liver or spleen.

[0069] As used herein, “hematopoietic chimerism” or “chimerism” is intended to describe the engraftment or survival of donor progenitor cells, e.g., stem cells, e.g., bone marrow-derived stem cells and/or hematopoietic stem cells, without continued immunosuppressive therapy, within a recipient organism, e.g., a mammal, e.g., a human. It is thought, although not intending to be bound by theory, that the mechanism that allows chimerism is a form of “immunological tolerance”, e.g. an immunologic response consisting of the development of specific non-reactivity of lymphoid tissues to a given antigen that in other circumstances induces cell-mediated or humoral immunity, e.g., graft versus host disease (GVHD).

[0070] The term “allele,” which is used interchangeably herein with “allelic variant” refers to alternative forms of a gene or portions thereof. Alleles occupy the same locus or position on homologous chromosomes. When a subject has two identical alleles of a gene, the subject is said to be homozygous for the gene or allele. When a subject has two different alleles of a gene, the subject is said to be heterozygous for the gene or allele. Alleles of a specific gene, including, but not limited to, the genes listed in Tables 4, 6, 7, and 8, can differ from each other in a single nucleotide, or several nucleotides, and can include substitutions, deletions, and insertions of nucleotides. An allele of a gene can also be a form of a gene containing one or more mutations.

[0071] The term “allelic variant of a polymorphic region of gene” or “allelic variant”, used interchangeably herein, refers to an alternative form of a gene having one of several possible nucleotide sequences found in that region of the gene in the population. As used herein, allelic variant is meant to encompass fluctional allelic variants, non-functional allelic variants, SNPs, mutations and polymorphisms. Lineage-specific allelic variants are those variants, e.g., functional allelic variants, non-functional allelic variants, SNPs, mutations and polymorphisms, that distinguish one lineage-specific cell from another. For example, a lineage-specific allelic variant described herein and/or identified by the methods of the invention may be utilized to distinguish recipient progenitor cells e.g., transfected cells or stem cells, e.g., bone marrow-derived stem cells and/or hematopoietic stem cells, from donor progenitor cells e.g., transfected cells or stem cells, e.g., bone marrow-derived stem cells and/or hematopoietic stem cells. For example, an allelic variant of the β-globin gene is, for example, a form of the β-globin gene with the nucleotide T at position 70 of SEQ ID No: 1. Other allelic variants used in the methods of the present invention include, but are not limited to, those variants listed in Table 9 (see below) and identified by a GenBank accession number, i.e., the reference SNP (rs) number.

[0072] The term “single nucleotide polymorphism” (SNP) refers to a polymorphic site occupied by a single nucleotide, which is the site of variation between allelic sequences. The site is usually preceded by and followed by highly conserved sequences of the allele (e.g., sequences that vary in less than 1/100 or 1/1000 members of a population). A SNP usually arises due to substitution of one nucleotide for another at the polymorphic site. SNPs can also arise from a deletion of a nucleotide or an insertion of a nucleotide relative to a reference allele. Typically the polymorphic site is occupied by a base other than the reference base. For example, where the reference allele contains the base “T” (thymidine) at the polymorphic site, the altered allele can contain a “C” (cytidine), “G” (guanine), or “A” (adenine) at the polymorphic site. SNP's may occur in protein-coding nucleic acid sequences, in which case they may give rise to a defective or otherwise variant protein, or genetic disease. Such a SNP may alter the coding sequence of the gene and therefore specify another amino acid (a “missense” SNP) or a SNP may introduce a stop codon (a “nonsense” SNP). When a SNP does not alter the amino acid sequence of a protein, the SNP is called “silent.” SNP's may also occur in noncoding regions of the nucleotide sequence. This may result in defective protein expression, e.g., as a result of alternative spicing, or it may have no effect on the function of the protein.

[0073] “Amplifying” refers to template-dependent processes and/or vector-mediated propagation which results in an increase in the concentration of a specific nucleic acid molecule relative to its initial concentration, or to an increase in the concentration of a detectable signal. As used herein, the term template-dependent process is intended to refer to a process that involves the template-dependent extension of a primer molecule. The term “template-dependent process” refers to nucleic acid synthesis of an RNA, DNA or cDNA molecule wherein the sequence of the newly synthesized strand of nucleic acid is dictated by the well-known rules of complementary base pairing (see, for example, Watson, J. D. et al., In: Molecular Biology of the Gene, 4th Ed., W. A. Benjamin, Inc., Menlo Park, Calif. (1987)). Typically, vector mediated methodologies involve the introduction of the nucleic acid fragment into a DNA or RNA vector, the clonal amplification of the vector, and the recovery of the amplified nucleic acid fragment. Examples of such methodologies are provided by Cohen, et al. (U.S. Pat. No. 4,237,224), Maniatis, T. et al., Molecular Cloning (A Laboratory Manual), Cold Spring Harbor Laboratory, 1982).

[0074] “Biological activity” or “bioactivity” or “activity” or “biological function”, which are used interchangeably, for the purposes herein when applied to a gene of the invention, e.g., those genes corresponding to the molecules listed in Tables 4, 6, 7, 8, means an effector or antigenic function of the polypeptide encoded by the genes of the invention that is directly or indirectly performed by a polypeptide (whether in its native or denatured conformation), or by a fragment thereof. For example, biological activities of the β-globin polypeptide include transportation of oxygen and other biological activities, whether presently known or inherent. Additional bioactivities of the polypeptides encoded by the genes of the invention include but are not limited to, T cell activation, T cell proliferation, inflammation, cytolytic activity, helper T cell function, e.g., Th1 and Th2 cell function, DC activation, and tolerance induction. Bioactivity can be modulated by directly affecting a protein by, for example, changing the level of effector or substrate level. Alternatively bioactivity can be modulated by modulating the level of a protein, such as by modulating expression of a gene. Antigenic functions include possession of an epitope or antigenic site that is capable of cross-reacting with antibodies that bind a native or denatured polypeptide or fragments thereof.

[0075] Biologically active polypeptides include polypeptides having both an effector and antigenic function, or only one of such functions. For example, β-globin polypeptides include antagonist polypeptides and native β-globin polypeptides, provided that such antagonists include an epitope of a native β-globin polypeptide. An effector function of, for example, a β-globin polypeptide, can be the ability to bind to a ligand of a β-globin molecule.

[0076] As used herein the term “bioactive fragment of a protein” refers to a fragment of a full-length protein wherein the fragment specifically mimics or antagonizes the activity of a wild-type protein. The bioactive fragment preferably is a fragment capable of binding to a second molecule, such as a ligand.

[0077] The term “an aberrant activity” or “abnormal activity”, as applied to an activity of a protein refers to an activity which differs from the activity of the normal or reference protein or which differs from the activity of the protein in a healthy subject, e.g., a subject not afflicted with a disease or disorder as described herein. An activity of a protein can be aberrant because it is stronger than the activity of its wild-type counterpart. Alternatively, an activity of a protein can be aberrant because it is weaker or absent relative to the activity of its normal or reference counterpart. An aberrant activity can also be a change in reactivity. For example an aberrant protein can interact with a different protein or ligand relative to its normal or reference counterpart. A cell can also have aberrant activity due to overexpression or underexpression of a gene. For example, aberrant β-globin activity can result from a mutation in the gene, which results, e.g., in lower or higher binding affinity of a ligand to the β-globin protein encoded by the mutated gene. Aberrant β-globin activity can also result from an abnormal β-globin 5′ upstream regulatory element activity.

[0078] The phrase “biological sample” is intended to include solid and body fluid samples isolated from a subject, as well as those present within a subject. The biological samples used in the present invention can include cells, nucleic acids, protein or membrane extracts of cells, blood or biological fluids such as ascites fluid or brain fluid (e.g., cerebrospinal fluid). Examples of solid biological samples include, but are not limited to, samples taken from tissues of bone, e.g., bone marrow, the central nervous system, breast, kidney, cervix, endometrium, head/neck, gallbladder, parotid gland, prostate, pituitary gland, muscle, esophagus, stomach, small intestine, colon, liver, spleen, pancreas, thyroid, heart, lung, bladder, adipose, lymph node, uterus, ovary, adrenal gland, testes, tonsils and thymus. Examples of “body fluid samples” include, but are not limited to blood, serum, semen, prostate fluid, seminal fluid, urine, saliva, sputum, mucus, bone marrow, lymph, and tears.

[0079] “Cells,” “host cells” or “recombinant host cells” are terms used interchangeably herein. It is understood that such terms refer not only to the particular cell but to the progeny or derivatives of such a cell. Because certain modifications may occur in succeeding generations due to either mutation or environmental influences, such progeny may not, in fact, be identical to the parent cell, but are still included within the scope of the term as used herein.

[0080] As used herein, the term “clinical course of therapy” refers to any chosen method to treat, prevent, or ameliorate a disease or disorder, e.g., a hematologic disease or disorder, e.g., sickle cell syndromes or thalassemia syndromes, symptoms thereof, or related diseases or disorders. Clinical courses of therapy include, but are not limited to, lifestyle changes (e.g., changes in diet or environment), administration of medication, e.g., immunosuppressive drugs, cellular therapy, such as lymphocyte infusion, use of medical devices, surgical procedures, cell transplantation, including stem cell transplantation, e.g., allogenic or autologous, e.g., myeloablative or nonmyeloablative, or any combination thereof.

[0081] As used herein, the term “gene” or “recombinant gene” refers to a nucleic acid molecule comprising an open reading frame and including at least one exon and (optionally) an intron sequence. The term “intron” refers to a DNA sequence present in a given gene which is spliced out during mRNA maturation.

[0082] “Homology” or “identity” or “similarity” refers to sequence similarity between two peptides or between two nucleic acid molecules. Homology can be determined by comparing a position in each sequence which may be aligned for purposes of comparison. When a position in the compared sequence is occupied by the same base or amino acid, then the molecules are homologous at that position. A degree of homology between sequences is a function of the number of matching or homologous positions shared by the sequences. An “unrelated” or “non-homologous” sequence shares less than 40% identity, though preferably less than 25% identity, with one of the sequences of the present invention.

[0083] To determine the percent identity of two amino acid sequences or of two nucleic acids, the sequences are aligned for optimal comparison purposes (e.g., gaps can be introduced in the sequence of a first amino acid or nucleic acid sequence for optimal alignment with a second amino or nucleic acid sequence). The amino acid residues or nucleotides at corresponding amino acid positions or nucleotide positions are then compared. When a position in the first sequence is occupied by the same amino acid residue or nucleotide as the corresponding position in the second sequence, then the. molecules are identical at that position. The percent identity between the two sequences is a function of the number of identical positions shared by the sequences (i.e., % identity=number of identical positions/total number of positions (e.g., overlapping positions)×100). In one embodiment the two sequences are the same length.

[0084] The determination of percent identity between two sequences can be accomplished using a mathematical algorithm. A preferred, non-limiting example of a mathematical algorithm utilized for the comparison of two sequences is the algorithm of Karlin and Altschul (1990) Proc. Natl. Acad. Sci. USA 87:2264-2268, modified as in Karlin and Altschul (1993) Proc. Natl. Acad. Sci. USA 90:5873-5877. Such an algorithm is incorporated into the NBLAST and XBLAST programs of Altschul, et al. (1990) J. Mol. Biol. 215:403-410. BLAST nucleotide searches can be performed with the NBLAST program, score=100, wordlength=12 to obtain nucleotide sequences homologous to a nucleic acid molecules of the invention. BLAST protein searches can be performed with the XBLAST program, score=50, wordlength=3 to obtain amino acid sequences homologous to a protein molecules of the invention. To obtain gapped alignments for comparison purposes, Gapped BLAST can be utilized as described in Altschul et al. (1997) Nucleic Acids Res. 25:3389-3402. Alternatively, PSI-Blast can be used to perform an iterated search which detects distant relationships between molecules. When utilizing BLAST, Gapped BLAST, and PSI-Blast programs, the default parameters of the respective programs (e.g., XBLAST and NBLAST) can be used. Another preferred, non-limiting example of a mathematical algorithm utilized for the comparison of sequences is the algorithm of Myers and Miller, (1988) CABIOS 4:11-17. Such an algorithm is incorporated into the ALIGN program (version 2.0) which is part of the GCG sequence alignment software package. When utilizing the ALIGN program for comparing amino acid sequences, a PAM120 weight residue table, a gap length penalty of 12, and a gap penalty of 4 can be used. Yet another useful algorithm for identifying regions of local sequence similarity and alignment is the FASTA algorithm as described in Pearson and Lipman (1988) Proc. Natl. Acad. Sci. USA 85:2444-2448. When using the FASTA algorithm for comparing nucleotide or amino acid sequences, a PAM120 weight residue table can, for example, be used with a k-tuple value of 2.

[0085] The term “a homolog of a nucleic acid” refers to a nucleic acid having a nucleotide sequence having a certain degree of homology with the nucleotide sequence of the nucleic acid or complement thereof. For example, a homolog of a double stranded nucleic acid having SEQ ID No: 1 is intended to include nucleic acids having a nucleotide sequence which has a certain degree of homology with SEQ ID No:1 or with the complement thereof. Preferred homologs of nucleic acids are capable of hybridizing to the nucleic acid or complement thereof.

[0086] The term “hybridization probe” or “primer” as used herein is intended to include oligonucleotides which hybridize and/or bind in a base-specific manner to a complementary strand of a target nucleic acid. Such probes include peptide nucleic acids, and described in Nielsen et al., (1991) Science 254:1497-1500. Probes and primers can be any length suitable for specific hybridization to the target nucleic acid sequence. The most appropriate length of the probe and primer may vary depending on the hybridization method in which it is being used; for example, particular lengths may be more appropriate for use in microfabricated arrays, while other lengths may be more suitable for use in classical hybridization methods, and still others more appropriate for polymerase chain reactions. Such optimizations are known to the skilled artisan. Suitable probes and primers can range form about 5 nucleotides to about 30 nucleotides in length. For example, probes and primers can be 5, 6, 8, 10, 12, 14, 16, 18, 20, 22, 24, 25, 26,28 or 30 nucleotides in length. The probe or primer of the invention comprises a sequence that flanks and/or overlaps, at least one polymorphic site occupied by any of the possible variant nucleotides. The nucleotide sequence of an overlapping probe or primer can correspond to the coding sequence of the allele or to the complement of the coding sequence of the allele.

[0087] The term “intronic sequence” or “intronic nucleotide sequence” refers to the nucleotide sequence of an intron or portion thereof.

[0088] The term “isolated” as used herein with respect to nucleic acids, such as DNA or RNA, refers to molecules separated from other DNAs or RNAs, respectively, that are present in the natural source of the macromolecule. The term isolated as used herein also refers to a nucleic acid or peptide that is substantially free of cellular material, viral material, or culture medium when produced by recombinant DNA techniques, or chemical precursors or other chemicals when chemically synthesized. Moreover, an “isolated nucleic acid” is meant to include nucleic acid fragments which are not naturally occurring as fragments and would not be found in the natural state. The term “isolated” is also used herein to refer to polypeptides which are isolated from other cellular proteins and is meant to encompass both purified and recombinant polypeptides.

[0089] The term “molecular structure” of a gene or a portion thereof refers to the structure as defined by the nucleotide content (including deletions, substitutions, additions of one or more nucleotides), the nucleotide sequence, the state of methylation, and/or any other modification of-the gene or portion thereof.

[0090] The term “mutated gene” refers to an allelic form of a gene that differs from the predominant form in a population. A mutated gene is capable of altering the phenotype of a subject having the mutated gene relative to a subject having the predominant form of the gene. If a subject must be homozygous for this mutation to have an altered phenotype, the mutation is said to be recessive. If one copy of the mutated gene is sufficient to alter the phenotype of the subject, the mutation is said to be dominant. If a subject has one copy of the mutated gene and has a phenotype that is intermediate between that of a homozygous and that of a heterozygous subject (for that gene), the mutation is said to be co-dominant.

[0091] As used herein, the term “nucleic acid” refers to polynucleotides such as deoxyribonucleic acid (DNA), complementary DNA (cDNA), and, where appropriate, ribonucleic acid (RNA), e.g., mRNA. The term should also be understood to include, as equivalents, derivatives, variants and analogs of either RNA or DNA made from nucleotide analogs, and, as applicable to the embodiment being described, single (sense or antisense) and double-stranded polynucleotides. Deoxyribonucleotides include deoxyadenosine, deoxycytidine, deoxyguanosine, and deoxythymidine. For purposes of clarity, when referring herein to a nucleotide of a nucleic acid, which can be DNA or an RNA, the terms “adenine”, “cytidine”, “guanine”, and thymidine” and/or “A”, “C”, “G”, and “T”, respectively, are used. It is understood that if the nucleic acid is RNA, a nucleotide having a uracil base is uridine.

[0092] The term “complementary nucleotide sequence”, refers to the nucleotide sequence of the complementary strand of a nucleic acid strand having a specific sequence. “Complementary” refers to the broad concept of sequence complementarity between regions of two nucleic acid strands or between two regions of the same nucleic acid strand. It is known that an adenine residue of a first nucleic acid region is capable of forming specific hydrogen bonds (“base pairing”) with a residue of a second nucleic acid region which is antiparallel to the first region if the residue is thymine or uracil. Similarly, it is known that a cytosine residue of a first nucleic acid strand is capable of base pairing with a residue of a second nucleic acid strand which is antiparallel to the first strand if the residue is guanine. A first region of a nucleic acid is complementary to a second region of the same or a different nucleic acid if, when the two regions are arranged in an antiparallel fashion, at least one nucleotide residue of the first region is capable of base pairing with a residue of the second region. Preferably, the first region comprises a first portion and the second region comprises a second portion, whereby, when the first and second portions are arranged in an antiparallel fashion, at least about 50%, and preferably at least about 75%, at least about 90%, or at least about 95% of the nucleotide residues of the first portion are capable of base pairing with nucleotide residues in the second portion. More preferably, all nucleotide residues of the first portion are capable of base pairing with nucleotide residues in the second portion.

[0093] The term “oligonucleotide” is intended to include any single- or double stranded DNA or RNA. Oligonucleotides can be naturally occurring or synthetic, but are typically prepared by synthetic means. Preferred oligonucleotides of the invention include segments of the genes listed in Tables 4, 6, 7, and 8, or their complements. The segments can be between about 5 and about 250 bases, about 10-240, 20-220, 30-210, 40-200, 50-190, 70-170, 90-150, 100-140, or 110-130 bases. For example, the segments can be about 15-25 bases, 16, 17, 18, 19, 20, 21, 22, 23, 24, or 25 bases, preferably 21 bases.

[0094] The term “operably-linked” is intended to mean that the 5′ upstream regulatory element is associated with a nucleic acid in such a manner as to facilitate transcription of the nucleic acid from the 5′ upstream regulatory element.

[0095] The term “polymorphism” refers to the coexistence of more than one form of a gene or portion thereof. A portion of a gene of which there are at least two different forms, i.e., two different nucleotide sequences, is referred to as a “polymorphic region of a gene.” A polymorphic locus can be a single nucleotide, the identity of which differs in the other alleles. A polymorphic locus can also be more than one nucleotide long. The allelic form occurning most frequently in a selected population is often referred to as the reference and/or wildtype form. Other allelic forms are typically designated as alternative or variant alleles. Diploid organisms may be homozygous or heterozygous for allelic forms. A diallelic or biallelic polymorphism has two forms. A trialleleic polymorphism has three forms.

[0096] A “polymorphic gene” refers to a gene having at least one polymorphic region.

[0097] The term “primer” as used herein, refers to a single-stranded oligonucleotide which acts as a point of initiation of template-directed DNA synthesis under appropriate conditions (e.g., in the presence of four different nucleoside triphosphates and as agent for polymerization, such as DNA or RNA polymerase or reverse transcriptase to produce cDNA) in an appropriate buffer and at a suitable temperature. The length of a primer may vary but typically ranges from about 10, 15, 20, 25, 30, 35, 40, 45, 50, 55, 60, 70, 75, 80, 85, 90, to about 1000 nucleotides. A primer need not match the exact sequence of a template, but must be sufficiently complementary to hybridize with the template.

[0098] The term “primer pair” refers to a set of primers including an upstream primer that hybridizes with the 5′ end of the complement of the DNA sequence to be amplified and a downstream primer that hybridizes with the 3′ end of the sequence to be amplified.

[0099] The terms “protein”, “polypeptide” and “peptide” are used interchangeably herein when referring to a gene product.

[0100] The term “recombinant protein” refers to a polypeptide which is produced by recombinant DNA techniques, wherein generally, DNA encoding the polypeptide is inserted into a suitable expression vector which is in turn used to transform a host cell to produce the heterologous protein.

[0101] A “regulatory element”, also termed herein “regulatory sequence” is intended to include elements which are capable of modulating transcription from a 5′ upstream regulatory sequence, including, but not limited to, a basic promoter, and include elements such as enhancers and silencers. The term “enhancer”, also referred to herein as “enhancer element”, is intended to include regulatory elements capable of increasing, stimulating, or enhancing transcription from a 5′ upstream regulatory element, including a basic promoter. The term “silencer”, also referred to herein as “silencer element” is intended to include regulatory elements capable of decreasing, inhibiting, or repressing transcription from a 5′ upstream regulatory element, including a basic promoter. Regulatory elements are typically present in 5′ flanking regions of genes. Regulatory elements also may be present in other regions of a gene, such as introns. Thus, for example, it is possible that a β-globin gene has regulatory elements located in introns, exons, coding regions, and 3′ flanking sequences. Such regulatory elements are also intended to be encompassed by the present invention and can be identified by any of the assays that can be used to identify regulatory elements in 5′ flanking regions of genes.

[0102] The term “regulatory element” further encompasses “tissue specific” regulatory elements, i.e., regulatory elements which effect expression of an operably linked DNA sequence preferentially in specific cells (e.g., cells of a specific tissue). Gene expression occurs preferentially in a specific cell if expression in this cell type is significantly higher than expression in other cell types. The term “regulatory element” also encompasses non-tissue specific regulatory elements, i.e., regulatory elements which are active in most cell types. Furthermore, a regulatory element can be a constitutive regulatory element, i.e., a regulatory element which constitutively regulates transcription, as opposed to a regulatory element which is inducible, i.e., a regulatory element which is active primarily in response to a stimulus. A stimulus can be, e.g., a molecule, such as a protein, hormone, cytokine, heavy metal, phorbol ester, cyclic AMP (cAMP), or retinoic acid.

[0103] Regulatory elements are typically bound by proteins, e.g., transcription factors. The term “transcription factor” is intended to include proteins or modified forms thereof, which interact preferentially with specific nucleic acid sequences, i.e., regulatory elements, and which in appropriate conditions stimulate or repress transcription. Some transcription factors are active when they are in the form of a monomer. Alternatively, other transcription factors are active in the form of a dimer consisting of two identical proteins or different proteins (heterodimer). Modified forms of transcription factors are intended to refer to transcription factors having a postranslational modification, such as the attachment of a phosphate group. The activity of a transcription factor is frequently modulated by a postranslational modification. For example, certain transcription factors are active only if they are phosphorylated on specific residues. Alternatively, transcription factors can be active in the absence of phosphorylated residues and become inactivated by phosphorylation. A list of known transcription factors and their DNA binding site can be found, e.g., in public databases, e.g., TFMATRIX Transcription Factor Binding Site Profile database.

[0104] As used herein, the term “specifically hybridizes” or “specifically detects” refers to the ability of a nucleic acid molecule of the invention to hybridize to at least approximately 6, 12, 20, 30, 40, 50, 60, 70, 80, 90, 100, 110, 120, 130 or 140 consecutive nucleotides of either strand of, for example, a gene corresponding to the molecules listed in Tables 4, 6, 7, and 8.

[0105] As used herein, the term “transfection” or “transfected with” refers to the introduction of exogenous nucleic acid into a mammalian cell and encompass a variety of techniques useful for introduction of nucleic acids into mammalian cells including. electroporation, calcium-phosphate precipitation, DEAE-dextran treatment, lipofection, microinjection and infection with viral vectors. Suitable methods for transfecting mammalian cells can be found in Sambrook et al. Molecular Cloning: A Laboratory Manual, 2nd Edition, Cold Spring Harbor Laboratory press (1989)) and other laboratory textbooks. Choice of suitable vectors for expression is well within the skill of the art. The nucleic acid is “in a form suitable for expression” in which the nucleic acid contains all of the coding and regulatory sequences required for transcription and translation of a gene, which may include promoters, enhancers and polyadenylation signals, and sequences necessary for transport of the molecule to the surface of the transfected cell, including N-terminal signal sequences. When the nucleic acid is a cDNA in a recombinant expression vector, the regulatory functions responsible for transcription and/or translation of the cDNA are often provided by viral sequences. Examples of commonly used viral promoters include those derived from polyoma, Adenovirus 2, cytomegalovirus and Simian Virus 40, and retroviral LTRs. Regulatory sequences linked to the cDNA can be selected to provide constitutive or inducible transcription, by, for example, use of an inducible promoter, such as the metallothienin promoter or a glucocorticoid-responsive promoter.

[0106] The term “transduction” is generally used herein when the transfection with a nucleic acid is by viral delivery of the nucleic acid. “Transformation” as used herein, refers to a process in which a cell's genotype is changed as a result of the cellular uptake of exogenous DNA or RNA, and, for example, the transformed cell expresses a recombinant form of a polypeptide or, in the case of anti-sense expression from the transferred gene, the expression of a naturally-occurring form of the recombinant protein is disrupted.

[0107] One approach for introducing nucleic acid into cells is by use of a viral vector containing nucleic acid. Examples of viral vectors which can be used include retroviral vectors (Eglitis, M. A., et al. (1985) Science 230:1395; Danos, O. and Mulligan, R. (1988) Proc. Natl. Acad. Sci., USA 85:6460); Markowitz, D., et al. (1988) J. Virol. 6:1120), adenoviral vectors (Rosenfeld, M. A., et al. (1992) Cell 68:143) and adeno-associated viral vectors (Tratschin, J. D., et al. (1985) Mol. Cell. Biol. 5:3251). Infection of cells with a viral vector has the advantage that a large proportion of cells will receive nucleic acid, thereby obviating a need for selection of cells which have received nucleic acid, and molecules encoded within the viral vector, e.g. by a cDNA contained in the viral vector, are expressed efficiently in cells which have taken up viral vector nucleic acid.

[0108] Alternatively, nucleic acids can be expressed on a cell using a plasmid expression vector which contains nucleic acid. Suitable plasmid expression vectors include CDM8 (Seed, B. (1987) Nature 329:840) and pMT2PC (Kaufman, I. (1987) EMBO J. 6:187). Since only a small fraction of cells (about 1 out of 105) typically integrate transfected plasmid DNA into their genomes, it is advantageous to transfect a nucleic acid encoding a selectable marker into the tumor cell along with the nucleic acid(s) of interest. Preferred selectable markers include those which confer resistance to drugs such as G418, hygromycin and methotrexate. Selectable markers may be introduced on the same plasmid as the nucleic acid(s) of interest or may be introduced on a separate plasmid.

[0109] As used herein, the term “transgene” refers to a nucleic acid sequence which has been genetic-engineered into a cell. Daughter cells deriving from a cell in which a transgene has been introduced, e.g., a progenitor cell, are also said to contain the transgene (unless it has been deleted). A transgene can encode, e.g., a polypeptide, or an antisense transcript, partly or entirely heterologous, i.e., foreign, to the transgenic cell into which it is introduced, or, is homologous to an endogenous gene of the transgenic cell into which it is introduced, but which is designed to be inserted, or is inserted, into the organism's genome in such a way as to alter the genome of the cell into which it is inserted (e.g., it is inserted at a location which differs from that of the natural gene or its insertion results in a knockout). Alternatively, a transgene can also be present in an episome. A transgene can include one or more transcriptional regulatory sequence and any other nucleic acid, (e.g. intron), that may be necessary for optimal expression of a selected nucleic acid.

[0110] The term “treatment”, or “treating” as used herein, is defined as the application or administration of a therapeutic agent to a subject, implementation of lifestyle changes (e.g., changes in diet or environment), administration of medication, e.g., immunosuppressive agents, cellular therapy, such as lymphocyte infusion, use of medical devices, or, surgical procedures, cell transplantation, including stem cell transplantation e.g., allogenic or autologous, e.g., myeloablative or nonmyeloablative, application, administration of a therapeutic agent to an isolated cell or tissue or cell line from a subject, or any combination thereof, who has a disease or disorder, a symptom of disease or disorder or a predisposition toward a disease or disorder, with the purpose to cure, heal, alleviate, relieve, alter, remedy, ameliorate, improve or affect the disease or disorder, the symptoms of the disease or disorder, or the predisposition toward disease. The term treatment or treating refers to either (I) the prevention of a disease or disorder (prophylaxis), or (2) the reduction or elimination of symptoms of the disease or disorder (therapy). The terms “prevention”, “prevent” or “preventing” as used herein refers to inhibiting, averting or obviating the onset or progression of a disease or disorder.

[0111] As used herein, the term “vector” refers to a nucleic acid molecule capable of transporting or replicating another nucleic acid to which it has been linked. One type of preferred vector is an episome, i.e., a nucleic acid capable of extra-chromosomal replication. Preferred vectors are those capable of autonomous replication and/or expression of nucleic acids to which they are linked. Vectors capable of directing the expression of genes to which they are operatively-linked are referred to herein as “expression vectors”.

Isolated Nucleic Acid Molecules Used in the Methods of the Invention

[0112] The methods of the invention include the use of isolated nucleic acid molecules that encode for proteins that are useful for the identification of lineage-specific cells, including, but not limited to, those molecules listed in Tables 4, 6, 7, and 8, proteins, or biologically active portions thereof, as well as nucleic acid fragments sufficient for use as hybridization probes to identify nucleic acid molecules that encode for molecules that are useful for the identification of lineage-specific cells (e.g., RNA) and fragments for use, for example, as PCR primers for the amplification of nucleic acid molecules that encode for proteins that are useful for the identification of lineage-specific cells. It is understood that genes other than those listed in Tables 4, 6, 7, 8, and 9 may be used in the methods of the invention, including genes which are expressed only by a certain cell type, e.g., lineage-specific genes.

[0113] One example of a nucleic acid that is useful for the identification of lineage-specific cells is β-globin. The nucleotide sequence of the isolated human β-globin cDNA and the predicted amino acid sequence of the human β-globin polypeptide are shown in SEQ ID Nos: 1 and 2, respectively. The nucleotide sequence of β-globin is also described in GenBank Accession No. GI: 28302128 (SEQ ID No: 1) (the contents of which are included herein by reference). Other examples of nucleic acids that are useful for the identification of lineage-specific cells include, but are not limited to CD4 (SEQ ID Nos:25-26, GenBank Accession No. GI: 21314613), CD8 (SEQ ID Nos:27-28, GenBank Accession No. GI: 27886640; SEQ ID Nos:29-30, GenBank Accession No. GI: 27886641; SEQ ID Nos:31-32, GenBank Accession No. GI: 27886630; SEQ ID Nos:33-34, GenBank Accession No. GI: 27886638; SEQ ID Nos:35-36, GenBank Accession No. GI: 27886634; SEQ ID Nos:37-38, GenBank Accession No. GI: 27886636; SEQ ID Nos:39-40, GenBank Accession No. GI: 27886629; SEQ ID Nos:41-42, GenBank Accession No. GI: 27886632), KIR (SEQ ID Nos:43-44, GenBank Accession No. GI: 33589849; SEQ ID Nos:45-46, GenBank Accession No. GI: 31982877; SEQ ID Nos:47-48, GenBank Accession No. GI: 30102932; SEQ ID Nos:49-50, GenBank Accession No. GI: 23592225; SEQ ID Nos:51-52, GenBank Accession No. GI: 11968153; SEQ ID Nos:53-54, GenBank Accession No. GI: 7705567; SEQ ID Nos:55-56, GenBank Accession No. GI: 7657278; SEQ ID Nos:57-58, GenBank Accession No. GI: 7657276; SEQ ID Nos:59-60, GenBank Accession No. GI: 7657272; SEQ ID Nos:61-62, GenBank Accession No. GI: 7657270; SEQ ID Nos:63-64, GenBank Accession No. GI: 7019440; SEQ ID Nos:65-66, GenBank Accession No. GI: 6912475; SEQ ID Nos:67-68, GenBank Accession No. GI: 6912473; SEQ ID Nos:69-70, GenBank Accession No. GI: 6912471; SEQ ID Nos:71-72, GenBank Accession No. GI: 580305 1; SEQ ID Nos:73-74, GenBank Accession No. GI: 7657280); genes that encode proteins specific to the erythroid cell lineage, including but not limited to, Kell blood group antigen (SEQ ID Nos:80-81; GenBank Accession No. GI:17025233), Lutheran blood group antigen (SEQ ID Nos:82-83; GenBank Accession No. GI: 31543105), Glycophorin A (SEQ ID-Nos:84-85; GenBank Accession No. GI: 8051602), Glycophorin B (SEQ ID Nos:86-87; GenBank Accession No. GI: 8051603), Glycophorin C (SEQ ID Nos:88-89; variant 1; GenBank Accession No. GI: 21614502) (SEQ ID Nos:330-331; variant 2; GenBank Accession No. GI: 21614516), Rhesus blood group CcEe antigen (SEQ ID Nos:90-91; variant 1; GenBank Accession No. GI: 20336217) (SEQ ID Nos:332-333; variant 2; GenBank Accession No. GI: 20336222) (SEQ ID Nos:334-335; variant 3; GenBank Accession No. GI: 20336218), (SEQ ID Nos:336-337; variant 4; GenBank Accession No. GI: 20336220), Rhesus blood group B (SEQ ID Nos:92-93; GenBank Accession No. GI: 9966890), Solute carrier family 4, Diego blood group (SEQ ID Nos:94-95; GenBank Accession No. GI: 4507020), Solute, carrier family, Kidd blood group (SEQ ID Nos:96-97; GenBank Accession No. GI: 7706676), Alpha globin 1 (SEQ ID Nos:98-99; GenBank Accession No. GI: 14456711), Alpha globin 2 (SEQ ID Nos: 100-101; GenBank Accession No. GI: 14043068), Erythrocyte membrane protein band 4.2 (SEQ ID Nos:102-103; GenBank Accession No. GI: 4557558), Heme Oxygenase 1 (SEQ ID Nos:326-327; GenBank Accession No. GI: 4504436), Heme oxygenase 2 (SEQ ID Nos:328-329; GenBank Accession No. GI: 8051607); genes that encode proteins specific to the lymphocyte cell lineage, e.g., T cells, including but not limited to, CD3, (SEQ ID Nos:17-18, GenBank Accession No. GI: 4502668; SEQ ID Nos:19-20, GenBank Accession No. GI: 4502670; SEQ ID Nos:21-22, GenBank Accession No. GI: 4557428; SEQ ID Nos:23-24, GenBank Accession No. GI: 4557430), TCRA (SEQ ID Nos:104-105, GenBank Accession No. GI: 338765), LNK (SEQ ID Nos:106-107, GenBank Accession No. GI: 4885454), CD28 (SEQ ID Nos:108-109, GenBank Accession No. GI: 5453610); genes that encode proteins specific to the lymphocyte cell lineage, e.g., B cells, including but not limited to, CD20 (SEQ ID Nos:9-10, GenBank Accession No. GI: 23110988; SEQ ID Nos; 11-12, GenBank Accession No. GI: 23110990; SEQ ID Nos: 13-14, GenBank Accession No. GI: 23110986), CD19 (SEQ ID Nos:15-16, GenBank Accession No. GI: 32481214), CD22 (SEQ ID Nos: 110-111, GenBank Accession No. GI: 4502650), CD79A (SEQ ID Nos:112-113, variant 1, GenBank Accession No. GI: 4502684), (SEQ ID Nos:338-339, variant 2, GenBank Accession No. GI: 11038671), CD79B (SEQ ID Nos:114-115, variant 1, GenBank Accession No. GI: 11038673), (SEQ ID Nos:340-341, variant 2, GenBank Accession No. GI: 11038675), B cell linker (BLINK) (SEQ ID Nos: 116-117, GenBank Accession No. GI: 40353774); genes that encode proteins specific to the lymphocyte cell lineage, e.g., monocytes, including but not limited to, CD14 (SEQ ID Nos:118-119, GenBank Accession No. GI: 4557416); genes that encode proteins specific to the lymphocyte cell lineage, e.g., NK cells, including but not limited to, CD56 (NCAM1) (SEQ ID Nos:120-121, variant 1, GenBank Accession No. GI: 10834989), (SEQ ID Nos:342-343, variant 2, GenBank Accession No. GI: 41281936), CD94 (CLEC2) (SEQ ID Nos: 122-123, variant 1, GenBank Accession No. GI: 7669497), (SEQ ID Nos:344-345, variant 2, GenBank Accession No. GI: 7669498), CD16 (PCGR3A) (SEQ ID Nos: 124-125, GenBank Accession No. GI: 51593094), CD160 (SEQ ID Nos:126-127, GenBank Accession No. GI: 51702223); dendritic cell gene products, including, but not limited to, DC-SIGN (SEQ ID Nos:75-76; GenBank Accession No. GI: 22095359), DC-LAMP (SEQ ID Nos:128-129, GenBank Accession No. GI: 38455384), BDCA2 (SEQ ID Nos:130-131, variant 1, GenBank Accession No. GI: 45580689), (SEQ ID Nos:132-133, variant 2, GenBank Accession No. GI: 45580691), CD83 (SEQ ID Nos:134-135, GenBank Accession No. GI: 24475618); activated T cell gene products, including, but not limited to, IL2 (SEQ ID Nos:136-137, GenBank Accession No. GI: 28178860), CD69 (SEQ ID Nos:138-139, GenBank Accession No. GI: 4502680), IL7 (SEQ ID Nos:140-141, GenBank Accession No. GI: 28610152), IL15 (SEQ ID Nos:142-143, variant 3, GenBank Accession No. GI: 26787979) (SEQ ID Nos:346-347, variant 1, GenBank Accession No. GI:26787983) (SEQ ID Nos:348-349, variant 2, GenBank Accession No. GI: 26787985); proinflammatory cytokine, e.g., chemokine, gene products, including, but not limited to, IL1b (SEQ ID Nos:144-145, GenBank Accession No. GI: 27894305), TNFα (SEQ ID Nos:146-147, GenBank Accession No. GI: 25952110), IL6 (SEQ ID Nos: 148-149, GenBank Accession No. GI: 10834983), IL8 (SEQ ID Nos: 150-151, GenBank Accession No. GI: 28610153); gene products associated with NK cell and/or cytolytic T cell activity, including, but not limited to, Perforin (SEQ ID Nos:152-153, GenBank Accession No. GI: 45935369), Granzyme B (SEQ ID Nos:154-155, GenBank Accession No. GI: 32483414), Granulysin (SEQ ID Nos: 156-157, variant 1, GenBank Accession No. GI: 7108343) (SEQ ID Nos:350-351, variant 2, GenBank Accession No. GI: 7108345), IFNγ (SEQ ID Nos:158-159, GenBank Accession No. GI: 10835170); Th1 cell gene products, including, but not limited to, IFNγ (SEQ ID Nos:158-159, GenBank Accession No. GI: 10835170), TNFα (SEQ ID Nos:146-147, GenBank Accession No. GI: 25952110), TNFβ (SEQ ID Nos: 160-161, GenBank Accession No. GI: 6806892), GMCSF (SEQ ID Nos:162-163, GenBank Accession No. GI: 27437029); Th2 cell gene products, including, but not limited to, IL4 (SEQ ID Nos:164-165, variant 1, GenBank Accession No. GI: 27477090), (SEQ ID Nos:352-353, variant 2, GenBank Accession No. GI: 27477091), IL10 (SEQ ID Nos: 166-167, GenBank Accession No. GI: 24430216), IL13 (SEQ ID Nos:168-169, GenBank Accession No. GI: 26787977); gene products associated with DC activation, including, but not limited to, IL12A (SEQ ID Nos: 170-171, GenBank Accession No. GI: 24430218), IL12B (SEQ ID Nos:354-355, GenBank Accession No. GI: 24497437), IFNα (SEQ ID Nos:172-173, GenBank Accession No. GI: 13128949), IFNα5 (SEQ ID Nos:378-379, GenBank Accession No. GI: 4504596), IFNα13 (SEQ ID Nos:380-381, GenBank Accession No. GI: 13128965); gene products associated with tolerance induction, including, but not limited to, IL10 (SEQ ID Nos:166-167, GenBank Accession No. GI: 24430216), TGFβ (SEQ ID Nos:174-175, GenBank Accession No. GI: 10863872); genes that encode proteins specific to the endothelial cell lineage, including but not limited to, vascular cell adhesion molecule 1 isoform a (VCAM1) (SEQ ID Nos:176-177, variant 1, GenBank Accession No. GI: 18201907), (SEQ ID Nos:356-357, variant 2, GenBank Accession No. GI: 18201908), Nitric oxide synthase 3 (NOS3) (SEQ ID Nos:178-179, GenBank Accession No. GI: 48762674), von Willebrand factor precursor (VWF) (SEQ ID Nos:180-181, variant 1, GenBank Accession No. GI: 21265033), (SEQ ID Nos:358-359, variant 3, GenBank Accession No. GI: 21265042), (SEQ ID Nos:358-359, variant 3, GenBank Accession No. GI: 21265045), (SEQ ID Nos:360-361, variant 2, GenBank Accession No. GI: 21265045), (SEQ ID Nos:362-363, variant 4, GenBank Accession No. GI: 21265048), VE-Cadherin, (SEQ ID Nos:182-183, GenBank Accession No. GI: 14589894), VEGFRI (SEQ ID Nos:184-185, GenBank Accession No. GI: 32306519), VEGFR2 (SEQ ID Nos:186-187, GenBank Accession No. GI: 11321596), tie-2, an endothelial-specific tyrosine kinase (SEQ ID Nos:188-189, GenBank Accession No. GI: 4557868); genes that encode proteins specific to the stromal cell lineage, including but not limited to, fibronectin (SEQ ID Nos:190-191, variant 3, GenBank Accession No. GI: 47132558) (SEQ ID Nos:364-365, variant 7, GenBank Accession No. GI: 47132546), (SEQ ID Nos:366-367, variant 6, GenBank Accession No. GI: 47132548), (SEQ ID Nos:368-369, variant 2, GenBank Accession No. GI: 47132550), (SEQ ID Nos:370-371, variant 5, GenBank Accession No. GI: 47132552), (SEQ ID Nos:372-373, variant 1, GenBank Accession No. GI: 47132556), (SEQ ID Nos:374-375, variant 4, GenBank Accession No. GI: 47132554), vimentin (SEQ ID Nos:192-193, GenBank Accession No. GI: 4507894), smooth-muscle actin (SEQ ID Nos:194-195, GenBank Accession No. GI: 4501882), N-cadherin (SEQ ID Nos:196-197, GenBank Accession No. GI: 14589888); genes that encode proteins specific to the osteoblast cell lineage, including but not limited to, type I procollagen (SEQ ID Nos:198-199, GenBank Accession No. GI: 14719826), alkaline phosphatase (SEQ ID Nos:200-201, GenBank Accession No. GI: 13787192), osteocalcin (SEQ ID Nos:202-203, variant 1, GenBank Accession No. GI: 41152108), (SEQ ID Nos:376-377, variant 2, GenBank Accession No. GI: 41152108), (all the contents of which are included herein by reference).

[0114] The methods of the invention include the use of isolated nucleic acid molecules that encode proteins or biologically active portions thereof of, for example, the molecules listed in Tables 4, 6, 7, and 8, as well as nucleic acid fragments sufficient for use as hybridization probes to identify nucleic acid molecules encoding, e.g., the molecules listed in Tables 4, 6, 7, and 8, and fragments for use, for example, as PCR primers for the amplification of nucleic acid molecules, e.g., the molecules listed in Tables 4, 6, 7, and 8. As used herein, the term “nucleic acid molecule” is intended to include DNA molecules (e.g., cDNA or genomic DNA) and RNA molecules (e.g., mRNA) and analogs of the DNA or RNA generated using nucleotide analogs. The nucleic acid molecule can be single-stranded or double-stranded, but preferably is double-stranded DNA.

[0115] A nucleic acid molecule used in the methods of the present invention, e.g., a nucleic acid molecule having the nucleotide sequence of SEQ ID Nos: 1, 9, 11, 13, 15, 17, 19, 21, 23, 25, 27, 29, 31, 33, 35, 37, 39, 41, 43, 45, 47, 49, 51, 53, 55, 57, 59, 61, 63, 65, 67, 69, 71, 73, 75, 80, 82, 84, 86, 88, 90, 92, 94, 96, 98, 100, 102, 104, 106, 108, 110, 112, 114, 116, 118, 120, 122, 124, 126, 128, 130, 132, 134, 136, 138, 140, 142, 144, 146, 148, 150, 152, 154, 156, 158, 160, 162, 164, 166, 168, 170, 172, 174, 176, 178, 180, 182, 184, 186, 188, 190, 192, 194, 196, 198, 200, 202, 330, 332, 334, 336, 338, 340, 342, 344, 346, 348, 350, 352, 354, 356, 358, 360, 362, 364, 366, 368, 370, 372, 374, 378, and 380, or a portion thereof, can be isolated using standard molecular biology techniques and the sequence information provided herein. Using all or portion of the nucleic acid sequence of SEQ ID No: 1, 9, 11, 13, 15, 17, 19, 21, 23, 25, 27, 29, 31, 33, 35, 37, 39, 41, 43, 45, 47, 49, 51, 53, 55, 57, 59, 61, 63, 65, 67, 69, 71, 73, 75, 80, 82, 84, 86, 88, 90, 92, 94, 96, 98, 100, 102, 104, 106, 108, 110, 112, 114, 116, 118, 120, 122, 124, 126, 128, 130, 132, 134, 136, 138, 140, 142, 144, 146, 148, 150, 152, 154, 156, 158, 160, 162, 164, 166, 168, 170, 172, 174, 176, 178, 180, 182, 184, 186, 188, 190, 192, 194, 196, 198, 200, 202, 330, 332, 334, 336, 338, 340, 342, 344, 346, 348, 350, 352, 354, 356, 358, 360, 362, 364, 366, 368, 370, 372, 374, 378, and 380, as hybridization probes, nucleic acid molecules corresponding to the molecules listed in Tables 4, 6, 7, and 8, can be isolated using standard hybridization and cloning techniques (e.g., as described in Sambrook, J., Fritsh, E. F., and Maniatis, T. Molecular Cloning: A Laboratory Manual. 2nd, ed., Cold Spring Harbor Laboratory, Cold Spring Harbor Laboratory Press, Cold Spring Harbor, N.Y., 1989).

[0116] Moreover, a nucleic acid molecule encompassing all or a portion of SEQ ID Nos: 1, 9, 11, 13, 15, 17, 19, 21, 23, 25, 27, 29, 31, 33, 35, 37, 39, 41, 43, 45, 47, 49, 51, 53, 55, 57, 59, 61, 63, 65, 67, 69, 71, 73, 75, 80, 82, 84, 86, 88, 90, 92, 94, 96, 98, 100, 102, 104, 106, 108, 110, 112, 114, 116, 118, 120, 122, 124, 126, 128, 130, 132, 134, 136, 138, 140, 142, 144, 146, 148, 150, 152, 154, 156, 158, 160, 162, 164, 166, 168, 170, 172, 174, 176, 178, 180, 182, 184, 186, 188, 190, 192, 194, 196, 198, 200, 202, 330, 332, 334, 336, 338, 340, 342, 344, 346, 348, 350, 352, 354, 356, 358, 360, 362, 364, 366, 368, 370, 372, 374, 378, and 380, can be isolated by the polymerase chain reaction (PCR), including RT-PCR, using synthetic primers and/or primer pairs designed based upon the sequence of SEQ ID Nos: 1, 9, 11, 13, 15, 17, 19, 21, 23, 25, 27, 29, 31, 33, 35, 37, 39, 41, 43, 45, 47, 49, 51, 53, 55, 57, 59, 61, 63, 65, 67, 69, 71, 73, 75, 80, 82, 84, 86, 88, 90, 92, 94, 96, 98, 100, 102, 104, 106, 108, 110, 112, 114, 116, 118, 120, 122, 124, 126, 128, 130, 132, 134, 136, 138, 140, 142, 144, 146, 148, 150, 152, 154, 156, 158, 160, 162, 164, 166, 168, 170, 172, 174, 176, 178, 180, 182, 184, 186, 188, 190, 192, 194, 196, 198, 200, 202, 330, 332, 334, 336, 338, 340, 342, 344, 346, 348, 350, 352, 354, 356, 358, 360, 362, 364, 366, 368, 370, 372, 374, 378, and 380.

[0117] A nucleic acid used in the methods of the invention can be amplified using cDNA, RNA or, alternatively, genomic DNA as a template and appropriate primers and/or primer pairs according to standard PCR amplification techniques. Furthermore, primers and/or primer pairs corresponding to the nucleotide sequences of, e.g., the molecules listed in Tables 4, 6, 7, and 8, can be prepared by standard synthetic techniques, e.g., using an automated DNA synthesizer. The primers and/or primer pairs of the invention may further comprise a label group attached thereto e.g., biotin, and in addition to their use in PCR and RT-PCR may be utilized in sequencing reactions, e.g., pyrosequencing, or CHIP-based or array-based detection methods, e.g., using Affymetrix Gene CHIP systems. Particularly preferred oligonucleotides for use in the methods of the invention include SEQ ID Nos. 3-8.

[0118] The design of additional oligonucleotides, primers and/or primer pairs for use in the amplification of isolated nucleic acid molecules of, e.g. the molecules listed in Tables 4, 6, 7, and 8, and/or detection of allelic variants (discussed below) of, e.g., the molecules listed in Tables 4, 6, 7, and 8, by the methods of the invention is within the scope of the invention. Suitable oligonucleotides, primers and/or primer pairs for the detection of allelic variants, for use in PCR and/or for sequence analysis of the genes of the invention, e.g., the molecules listed in Tables 4, 6, 7, and 8, can be readily designed using this sequence information and standard techniques known in the art for the design and optimization of oligonucleotide, primer and/or primer pair sequences. Optimal design of such oligonucleotides, primers and/or primer pairs sequences is achieved, for example, by the use of commercially available primer selection programs such as Primer 2.1, Primer 3 or GeneFisher.

[0119] In a preferred embodiment, the isolated nucleic acid molecules used in the methods of the invention comprise the nucleotide sequences shown in SEQ ID Nos: 1, 9, 11, 13, 15, 17, 19, 21, 23, 25, 27, 29, 31, 33, 35, 37, 39, 41, 43, 45, 47, 49, 51, 53, 55, 57, 59, 61, 63, 65, 67, 69, 71, 73, 75, 80, 82, 84, 86, 88, 90, 92, 94, 96, 98, 100, 102, 104, 106, 108, 110, 112, 114, 116, 118, 120, 122, 124, 126, 128, 130, 132, 134, 136, 138, 140, 142, 144, 146, 148, 150, 152, 154, 156, 158, 160, 162, 164, 166, 168, 170, 172, 174, 176, 178, 180, 182, 184, 186, 188, 190, 192, 194, 196, 198, 200, 202, 330, 332, 334, 336, 338, 340, 342, 344, 346, 348, 350, 352, 354, 356, 358, 360, 362, 364, 366, 368, 370, 372, 374, 378, and 380, a complement of the nucleotide sequence shown in SEQ ID Nos: 1,9, 11, 13, 15, 17, 19, 21, 23, 25, 27, 29, 31, 33, 35, 37, 39, 41, 43, 45, 47, 49, 51, 53, 55, 57, 59, 61, 63, 65, 67, 69, 71, 73, 75, 80, 82, 84, 86, 88, 90, 92, 94, 96, 98, 100, 102, 104, 106, 108, 110, 112, 114, 116, 118, 120, 122, 124, 126, 128, 130, 132, 134, 136, 138, 140, 142, 144, 146, 148, 150, 152, 154, 156, 158, 160, 162, 164, 166, 168, 170, 172, 174, 176, 178, 180, 182, 184, 186, 188, 190, 192, 194, 196, 198, 200, 202, 330, 332, 334, 336, 338, 340, 342, 344, 346, 348, 350, 352, 354, 356, 358, 360, 362, 364, 366, 368, 370, 372, 374, 378, and 380, or a portion of any of these nucleotide sequences. A nucleic acid molecule which is complementary to the nucleotide sequences shown in SEQ ID Nos: 1, 9, 11, 13, 15, 17, 19, 21, 23, 25, 27, 29, 31, 33, 35, 37, 39, 41, 43, 45, 47, 49, 51, 53, 55, 57, 59, 61, 63, 65, 67,69, 71, 73, 75, 80, 82, 84, 86, 88, 90, 92, 94, 96, 98, 100, 102, 104, 106, 108, 110, 112, 114, 116, 118, 120, 122, 124, 126, 128, 130, 132, 134, 136, 138, 140, 142, 144, 146, 148, 150, 152, 154, 156, 158, 160, 162, 164, 166, 168, 170, 172, 174, 176, 178, 180, 182, 184, 186, 188, 190, 192, 194, 196, 198, 200, 202, 330, 332, 334, 336, 338, 340, 342, 344, 346, 348, 350, 352, 354, 356, 358, 360, 362, 364, 366, 368, 370, 372, 374, 378, and 380 is one which is sufficiently complementary to the nucleotide sequences shown in SEQ ID Nos: 1, 9, 11, 13, 15, 17, 19, 21, 23, 25, 27, 29, 31, 33, 35, 37, 39, 41, 43, 45, 47, 49, 51, 53, 55, 57, 59, 61, 63, 65, 67, 69, 71, 73, 75, 80, 82, 84, 86, 88, 90, 92, 94, 96, 98, 100, 102, 104, 106, 108, 110, 112, 114, 116, 118, 120, 122, 124, 126, 128, 130, 132, 134, 136, 138, 140, 142, 144, 146, 148, 150, 152, 154, 156, 158, 160, 162, 164, 166, 168, 170, 172, 174, 176, 178, 180, 182, 184, 186, 188, 190, 192, 194, 196, 198, 200, 202, 330, 332, 334, 336, 338, 340, 342, 344, 346, 348, 350, 352, 354, 356, 358, 360, 362, 364, 366, 368, 370, 372, 374, 378, and 380, such that it can hybridize to the nucleotide sequence shown in SEQ ID No: 1, 9, 11, 13, 15, 17, 19, 21, 23, 25, 27, 29, 31, 33, 35, 37, 39, 41, 43, 45, 47, 49, 51, 53, 55, 57, 59, 61, 63, 65, 67, 69, 71, 73, 75, 80, 82, 84, 86, 88, 90, 92, 94, 96, 98, 100, 102, 104, 106, 108, 110, 112, 114, 116, 118, 120, 122, 124, 126, 128, 130, 132, 134, 136, 138, 140, 142, 144, 146, 148, 150, 152, 154, 156, 158, 160, 162, 164, 166, 168, 170, 172, 174, 176, 178, 180, 182, 184, 186, 188, 190, 192, 194, 196, 198, 200, 202, 330, 332, 334, 336, 338, 340, 342, 344, 346, 348, 350, 352, 354, 356, 358, 360, 362, 364, 366, 368, 370, 372, 374, 378, and 380, thereby forming a stable duplex.

[0120] In still another preferred embodiment, an isolated nucleic acid molecule used in the methods of the present invention comprises a nucleotide sequence which is at least about 55%, 60%, 65%, 70%, 75%, 80%, 85%, 90%, 95%, 96%, 97%, 98%, 99% or more identical to the entire length of the nucleotide sequences shown in SEQ ID Nos: 1, 9, 11, 13, 15, 17, 19, 21, 23, 25, 27, 29, 31, 33, 35, 37, 39, 41, 43, 45, 47, 49, 51, 53, 55, 57, 59, 61, 63, 65, 67, 69, 71, 73, 75, 80, 82, 84, 86, 88, 90, 92, 94, 96, 98, 100, 102, 104, 106, 108, 110, 112, 114, 116, 118, 120, 122, 124, 126, 128, 130, 132, 134, 136, 138, 140, 142, 144, 146, 148, 150, 152, 154, 156, 158, 160, 162, 164, 166, 168, 170, 172, 174, 176, 178, 180, 182, 184, 186, 188, 190, 192, 194, 196, 198, 200, 202, 330, 332, 334, 336, 338, 340, 342, 344, 346, 348, 350, 352, 354, 356, 358, 360, 362, 364, 366, 368, 370, 372, 374, 378, and 380, or a portion of any of these nucleotide sequences.

[0121] Moreover, the nucleic acid molecules used in the methods of the invention can comprise only a portion of the nucleic acid sequences of SEQ ID No: 1, 9, 11, 13, 15, 17, 19, 21, 23, 25, 27, 29, 31, 33, 35, 37, 39, 41, 43, 45, 47, 49, 51, 53, 55, 57, 59, 61, 63, 65, 67, 69, 71, 73, 75, 80, 82, 84, 86, 88, 90, 92, 94, 96, 98, 100, 102, 104, 106, 108, 110, 112, 114, 116, 118, 120, 122, 124, 126, 128, 130, 132, 134, 136, 138, 140, 142, 144, 146, 148, 150, 152, 154, 156, 158, 160, 162, 164, 166, 168, 170, 172, 174, 176, 178, 180, 182, 184, 186, 188, 190, 192, 194, 196, 198, 200, 202, 330, 332, 334, 336, 338, 340, 342, 344, 346, 348, 350, 352, 354, 356, 358, 360, 362, 364, 366, 368, 370, 372, 374, 378, and 380, for example, a fragment which can be used as a probe or primer or a fragment encoding, for example, a portion of molecule listed in Tables 4, 6, 7, and 8, that contains an allelic variant and/or mutation. The probe and/or primer typically comprise substantially purified oligonucleotide. The oligonucleotide typically comprises a region of nucleotide sequence that hybridizes under stringent conditions to at least about 12 or 15, preferably about 20 or 25, more preferably about 30, 35, 40, 45, 50, 55, 60, 65, or 75 consecutive nucleotides of a sense sequence of SEQ ID Nos: 1, 9, 11, 13, 15, 17, 19, 21, 23, 25, 27, 29, 31, 33, 35, 37, 39, 41, 43, 45, 47, 49, 51, 53, 55, 57, 59, 61, 63, 65, 67, 69, 71, 73, 75, 80, 82, 84, 86, 88, 90, 92, 94, 96, 98, 100, 102, 104, 106, 108, 110, 112, 114, 116, 118, 120, 122, 124, 126, 128, 130, 132, 134, 136, 138, 140, 142, 144, 146, 148, 150, 152, 154, 156, 158, 160, 162, 164, 166, 168, 170, 172, 174, 176, 178, 180, 182, 184, 186, 188, 190, 192, 194, 196, 198, 200, 202, 330, 332, 334, 336, 338, 340, 342, 344, 346, 348, 350, 352, 354, 356, 358, 360, 362, 364, 366, 368, 370, 372, 374, 378, and 380, of an anti-sense sequence of SEQ ID Nos: 1, 9, 11, 13, 15, 17, 19, 21, 23, 25, 27, 29, 31, 33, 35, 37, 39, 41, 43, 45, 47, 49, 51, 53, 55, 57, 59, 61, 63, 65, 67, 69, 71, 73, 75, 80, 82, 84, 86, 88, 90, 92, 94, 96, 98, 100, 102, 104, 106, 108, 110, 112, 114, 116, 118, 120, 122, 124, 126, 128, 130, 132, 134, 136, 138, 140, 142, 144, 146, 148, 150, 152, 154, 156, 158, 160, 162, 164, 166, 168, 170, 172, 174, 176, 178, 180, 182, 184, 186, 188, 190, 192, 194, 196, 198, 200, 202, 330, 332, 334, 336, 338, 340, 342, 344, 346, 348, 350, 352, 354, 356, 358, 360, 362, 364, 366, 368, 370, 372, 374, 378, and 380, or of a naturally occurring allelic variant or mutant of SEQ ID Nos: 1, 9, 11, 13, 15, 17, 19, 21, 23, 25, 27, 29, 31, 33, 35, 37, 39, 41, 43, 45, 47, 49, 51, 53, 55, 57, 59, 61, 63, 65, 67, 69, 71, 73, 75, 80, 82, 84, 86, 88, 90, 92, 94, 96, 98, 100, 102, 104, 106, 108, 110, 112, 114, 116, 118, 120, 122, 124, 126, 128, 130, 132, 134, 136, 138, 140, 142, 144, 146, 148, 150, 152, 154, 156, 158, 160, 162, 164, 166, 168, 170, 172, 174, 176, 178, 180, 182, 184, 186, 188, 190, 192, 194, 196, 198, 200, 202, 330, 332, 334, 336, 338, 340, 342, 344, 346, 348, 350, 352, 354, 356, 358, 360, 362, 364, 366, 368, 370, 372, 374, 378, and 380. In one embodiment, a nucleic acid molecule used in the methods of the present invention comprises a nucleotide sequence which is greater than 100, 100-200, 200-300, 300-400, 400-500, 500-600, 600-700, or more nucleotides in length and hybridizes under stringent hybridization conditions to a nucleic acid molecule of SEQ ID Nos: 1, 9, 11, 13, 15, 17, 19, 21, 23, 25, 27, 29, 31, 33, 35, 37, 39, 41, 43, 45, 47, 49, 51, 53, 55, 57, 59, 61, 63, 65, 67, 69, 71, 73, 75, 80, 82, 84, 86, 88, 90, 92, 94, 96, 98, 100, 102, 104, 106, 108, 110, 112, 114, 116, 118, 120, 122, 124, 126, 128, 130, 132, 134, 136, 138, 140, 142, 144, 146, 148, 150, 152, 154, 156, 158, 160, 162, 164, 166, 168, 170, 172, 174, 176, 178, 180, 182, 184, 186, 188, 190, 192, 194, 196, 198, 200, 202, 330, 332, 334, 336, 338, 340, 342, 344, 346, 348, 350, 352, 354, 356, 358, 360, 362, 364, 366, 368, 370, 372, 374, 378, and 380.

[0122] As used herein, the term “hybridizes under stringent conditions” is intended to describe conditions for hybridization and washing under which nucleotide sequences that are significantly identical or homologous to each other remain hybridized to each other. Preferably, the conditions are such that sequences at least about 70%, more preferably at least about 80%, even more preferably at least about 85% or 90% identical to each other remain hybridized to each other. Such stringent conditions are known to those skilled in the art and can be found in Current Protocols in Molecular Biology, Ausubel, et al., eds., John Wiley & Sons, Inc. (1995), sections 2, 4 and 6. Additional stringent conditions can be found in Molecular Cloning: a Laboratory Manual, Sambrook, et al., Cold Spring Harbor Press, Cold Spring Harbor, N.Y. (1989), chapters 7, 9 and 11. A preferred, non-limiting example of stringent hybridization conditions includes hybridization in 4× sodium chloride/sodium citrate (SSC), at about 65-70° C. (or hybridization in 4×SSC plus 50% formamide at about 42-50° C.) followed by one or more washes in 1×SSC, at about 65-70° C. A preferred, non-limiting example of highly stringent hybridization conditions includes hybridization in 1×SSC, at about 65-70° C. (or hybridization in 1×SSC plus 50% formamide at about 42-50° C.) followed by one or more washes in 0.3×SSC, at about 65-70° C. A preferred, non-limiting example of reduced stringency hybridization conditions includes hybridization in 4×SSC, at about 50-60° C. (or alternatively hybridization in 6×SSC plus 50% formamide at about 40-45° C.) followed by one or more washes in 2×SSC, at about 50-60° C. Ranges intermediate to the above-recited values, e.g., at 65-70° C. or at 42-50° C. are also intended to be encompassed by the present invention. SSPE (1×SSPE is 0.15M NaCl, 10 mM NaH₂PO₄, and 1.25 mM EDTA, pH 7.4) can be substituted for SSC (1×SSC is 0.15M NaCl and 15 mM sodium citrate) in the hybridization and wash buffers; washes are performed for 15 minutes each after hybridization is complete. The hybridization temperature for hybrids anticipated to be less than 50 base pairs in length should be 5-10° C. less than the melting temperature (Tₘ) of the hybrid, where Tₘ is determined according to the following equations. For hybrids less than 18 base pairs in length, Tₘ(° C.)=2(# of A+T bases)+4(# of G+C bases). For hybrids between 18 and 49 base pairs in length, Tₘ(° C.)=81.5+16.6(log₁₀ [Na⁺])+0.41(% G+C)−(600/N), where N is the number of bases in the hybrid, and [Na⁺] is the concentration of sodium ions in the hybridization buffer ([Na⁺] for 1×SSC=0.165 M). It will also be recognized by the skilled practitioner that additional reagents may be added to hybridization and/or wash buffers to decrease non-specific hybridization of nucleic acid molecules to membranes, for example, nitrocellulose or nylon membranes, including but not limited to blocking agents (e.g., BSA or salmon or herring sperm carrier DNA), detergents (e.g., SDS), chelating agents (e.g., EDTA), Ficoll, PVP and the like. When using nylon membranes, in particular, an additional preferred, non-limiting example of stringent hybridization conditions is hybridization in 0.25-0.5M NaH₂PO₄, 7% SDS at about 65° C., followed by one or more washes at 0.02M NaH₂PO₄, 1% SDS at 65° C, see e.g., Church and Gilbert (1984) Proc. Natl. Acad. Sci., USA 81:1991-1995, or alternatively 0.2×SSC, 1% SDS.

[0123] The methods of the invention further encompass the use of nucleic acid molecules that differ from the nucleotide sequences shown in SEQ ID Nos: 1, 9, 11, 13, 15, 17, 19, 21, 23, 25, 27, 29, 31, 33, 35, 37, 39, 41, 43, 45, 47, 49, 51, 53, 55, 57, 59, 61, 63, 65, 67, 69, 71, 73, 75, 80, 82, 84, 86, 88, 90, 92, 94, 96, 98, 100, 102, 104, 106, 108, 110, 112,114, 116, 118, 120, 122,124, 126, 128, 130, 132, 134, 136, 138, 140, 142, 144, 146, 148, 150, 152, 154, 156, 158, 160, 162,.164, 166, 168, 170, 172, 174, 176, 178, 180, 182, 184, 186, 188, 190, 192, 194, 196, 198, 200, 202, 330, 332, 334, 336, 338, 340, 342, 344, 346, 348, 350, 352, 354, 356, 358, 360, 362, 364, 366, 368, 370, 372, 374, 378, and 380, due to degeneracy of the genetic code and thus encode the same proteins (corresponding to the molecules listed in Tables 4, 6, 7, and 8) as those encoded by the nucleotide sequences shown in SEQ ID Nos: 1, 9, 11, 13, 15, 17, 19, 21, 23, 25, 27, 29, 31, 33, 35, 37, 39, 41, 43, 45, 47, 49, 51, 53, 55, 57, 59, 61, 63, 65, 67, 69, 71, 73, 75, 80, 82, 84, 86, 88, 90, 92, 94, 96, 98, 100, 102, 104, 106, 108, 110, 112, 114, 116, 118, 120, 122, 124, 126, 128, 130, 132, 134, 136, 138, 140, 142, 144, 146, 148, 150, 152, 154, 156, 158, 160, 162, 164, 166, 168, 170, 172, 174, 176, 178, 180, 182, 184, 186, 188, 190, 192, 194, 196, 198, 200, 202, 330, 332, 334, 336, 338, 340, 342, 344, 346, 348, 350, 352, 354, 356, 358, 360, 362, 364, 366, 368, 370, 372, 374, 378, and 380. In another embodiment, an isolated nucleic acid molecule included in the methods of the invention has a nucleotide sequence encoding a protein having an amino acid sequence shown in SEQ ID Nos:2, 10, 12, 14, 16, 18, 20, 22, 24, 26, 28, 30, 32, 34, 36, 38, 40, 42, 44, 46, 48, 50, 52, 54, 56, 58, 60, 62, 64, 66, 68, 70, 72, 74, 76, 81, 83, 85, 87, 89, 91, 93, 95, 97, 99, 101, 103, 105, 107, 109, 111, 113, 115, 117, 119, 121, 123, 125, 127, 129, 131, 133, 135, 137, 139, 141, 143, 145, 147, 149, 151, 153, 155, 157, 159, 161, 163, 165, 167, 169, 171, 173, 175, 177, 179, 181, 183, 185, 187, 189, 191, 193, 195, 197, 199, 201, 203, 331, 333, 335, 337, 339, 341, 343, 345, 347, 349, 351, 353, 355, 357, 359, 361, 363, 365, 367, 369, 371, 373, 375, 379, and 381.

[0124] The methods of the invention further include the use of and/or identification of lineage-specific allelic variants, e.g., functional allelic variants, non-functional allelic variants, SNPs, mutations and polymorphisms, of, e.g., the molecules listed in Tables 4, 6, 7, and 8. Functional allelic variants are naturally occurring amino acid sequence variants of the proteins of the invention, e.g., the protein corresponding to the molecules listed in Tables 4, 6, 7, and 8, that maintain an activity of the molecules listed in Tables 4, 6, 7, and 8. Functional allelic variants will typically contain only conservative substitution of one or more amino acids of SEQ ID No:2, 10, 12, 14, 16, 18, 20, 22, 24, 26, 28, 30, 32, 34, 36, 38, 40, 42, 44, 46, 48, 50, 52, 54, 56, 58, 60, 62, 64, 66, 68, 70, 72, 74, 76, 81, 83, 85, 87, 89, 91, 93, 95, 97, 99, 101, 103, 105, 107, 109, 111, 113, 115, 117, 119, 121, 123, 125, 127, 129, 131, 133, 135, 137, 139, 141, 143, 145, 147, 149, 151, 153, 155, 157, 159, 161, 163, 165, 167, 169, 171, 173, 175, 177, 179, 181, 183, 185, 187, 189, 191, 193, 195, 197, 199, 201, 201, 203, 331, 333, 335, 337, 339, 341, 343, 345, 347, 349, 351, 353, 355, 357, 359, 361, 363, 365, 367, 369, 371, 373, 375, 379, and 381, or substitution, deletion or insertion of non-critical residues in non-critical regions of the protein. Non-functional allelic variants are naturally occurring amino acid sequence variants of the human proteins corresponding to the molecules listed in Tables 4, 6, 7, and 8 that do not have an activity of the molecules listed in Tables 4, 6, 7, and 8. Non-functional allelic variants will typically contain a non-conservative substitution, deletion, or insertion or premature truncation of the amino acid sequence of SEQ ID No:2, 10, 12, 14, 16, 18, 20, 22, 24, 26, 28, 30, 32, 34, 36, 38, 40, 42, 44, 46, 48, 50, 52, 54, 56, 58, 60, 62, 64, 66, 68, 70, 72, 74, 76, 81, 83, 85, 87, 89, 91, 93, 95, 97, 99, 101, 103, 105, 107, 109, 111, 113, 115, 117, 119, 121, 123, 125, 127, 129, 131, 133, 135, 137, 139, 141, 143, 145, 147, 149, 151, 153, 155, 157, 159, 161, 163, 165, 167, 169, 171, 173, 175, 177, 179, 181, 183, 185, 187, 189, 191, 193, 195, 197, 199, 201, 201, 203, 331, 333, 335, 337, 339, 341, 343, 345, 347, 349, 351, 353, 355, 357, 359, 361, 363, 365, 367, 369, 371, 373, 375, 379, and 381, or a substitution, insertion or deletion in critical residues or critical regions of the protein.

[0125] A “conservative amino acid substitution” is one in which the amino acid residue is replaced with an amino acid residue having a similar side chain. Families of amino acid residues having similar side chains have been defined in the art. These families include amino acids with basic side chains (e.g., lysine, arginine, histidine), acidic side chains (e.g., aspartic acid, glutamic acid), uncharged polar side chains (e.g., asparagine, glutamine, serine, threonine, tyrosine, cysteine), nonpolar side chains (e.g., glycine, alanine, valine, leucine, isoleucine, proline, phenylalanine, methionine, tryptophan), beta-branched side chains (e.g., threonine, valine, isoleucine) and aromatic side chains (e.g., tyrosine, phenylalanine, tryptophan, histidine). Thus, a predicted nonessential amino acid residue in, for example, a β-globin protein, is preferably replaced with another amino acid residue from the same side chain family. In similar fashion, the amino acid repertoire can be grouped as acidic (e.g., aspartate, glutamate); basic (e.g., lysine, arginine histidine), aliphatic (e.g., glycine, alanine, valine, leucine, isoleucine, serine, threonine, with serine and threonine optionally be grouped separately as aliphatic-hydroxyl); aromatic (e.g., phenylalanine, tyrosine, tryptophan); amide (e.g., asparagine, glutamine); and sulfur-containing (e.g., cysteine and methionine). (see, for example, Biochemistry, 2^{nd} ed., Ed. by L. Stryer, W H Freeman and Co.: 1981). Whether a change in the amino acid sequence of a peptide results in a functional homolog, e.g. a functional β-globin homolog, (e.g., functional in the sense that the resulting polypeptide mimics or antagonizes the wild-type form) can be readily determined by assessing the ability of the variant peptide to produce a response in cells in a fashion similar to the wild-type protein, or competitively inhibit such a response. Polypeptides in which more than one replacement has taken place can readily be tested in the same manner.

[0126] Multiple allelic variants of the genes of the invention, e.g. genes corresponding to the molecules listed in Tables 4, 6, 7, and 8, have been identified and can be referenced by one of skill in the art. For example, allelic variants of β-globin that cause sickle cell syndromes have been identified and include, but are not limited to, a Glutamic acid to Valine substitution at amino acid 7 of SEQ ID No. :1 (referred to as Hb Sickle or HbS), a Glutamic acid to Lysine substitution at amino acid 7 of SEQ ID No.:1 (referred to as HbC), a Glutamic acid to Valine substitution at amino acid 27 of SEQ ID No.:1 (referred to as HbE), a Valine to Methionine substitution at amino acid 99 of SEQ ID No.:1 (referred to as Hb Koln), an Aspartate to Histidine substitution at amino acid 100 of SEQ ID No.:1 (referred to as Hb Yakima), an Asparagine to Lysine substitution at amino acid 103 of SEQ ID No.:1 (referred to as Hb Kansas), and a Histidine to Tyrosine substitution at amino acid 88 of SEQ ID No.:1 (referred to as Hb M. Iwata). Causative allelic variants of thalassemia syndromes have also been identified and number more than 125. See, e.g., Schwartz E, Benz E J, Forget B G. Thalassemia Syndromes. Hematology: Basic Principles and Practice. 1995:586-610, incorporated herein by reference. Additional allelic variants of the molecules of the invention are listed in Table 9 based on their GeneBank accession number.

[0127] Numerous procedures for determining the nucleotide sequence of a nucleic acid molecule, or for determining and/or detecting the presence of lineage-specific allelic variants, e.g., functional allelic variants, non-functional allelic variants, SNPs, mutations, and polymorphisms, in nucleic acid molecules, often include a nucleic acid amplification step, which can be carried out by, e.g., polymerase chain reaction (PCR).

[0128] Accordingly, in one embodiment, the invention provides primers for amplifying portions of a gene, e.g., a gene corresponding to the molecules listed in Tables 4, 6, 7, and 8, such as portions of exons and/or portions of introns. In a preferred embodiment, the exons and/or sequences adjacent to the exons of the human gene, e.g., the genes corresponding to the molecules listed in Tables 4, 6, 7, and 8, will be amplified to, e.g., detect which allelic variant, e.g., lineage-specific allelic variant, if any, of a polymorphic region is present in the gene, e.g., the genes corresponding to the molecules listed in Tables 4, 6, 7, and 8, of a subject. Preferred primers comprise a nucleotide sequence complementary a lineage-specific specific allelic variant of a polymorphic region, e.g., a polymorphic region of a gene corresponding to the molecules listed in Tables 4, 6, 7, and 8, and of sufficient length to selectively hybridize with a gene, e.g., a gene corresponding to the molecules listed in Tables 4, 6, 7, and 8, or a combination thereof. In a preferred embodiment, the primer, e.g., a substantially purified oligonucleotide, comprises a region having a nucleotide sequence which hybridizes under stringent conditions to about 6, 8, 10, or 12, preferably 25, 30, 40, 50, or 75 consecutive nucleotides of a gene, e.g., gene corresponding to the molecules listed in Tables 4, 6, 7, and 8.

[0129] In an even more preferred embodiment, the primer is capable of hybridizing to a nucleotide sequence, e.g., a nucleotide sequence of a molecule listed in Tables 4, 6, 7, and 8, complements thereof, lineage-specific allelic variants thereof, or complements of allelic variants thereof. For example, primers comprising a nucleotide sequence of at least about 15 consecutive nucleotides, at least about 25 nucleotides or having from about 15 to about 20 nucleotides as set forth, for example, in SEQ ID NOs:3-8, or the complement thereof, and are provided by the invention. Primers having a sequence of more than about 25 nucleotides are also within the scope of the invention.

[0130] A primer or probe can be used alone in a detection method, or a primer can be used together with at least one other primer or probe in a detection method. Primers can also be used to amplify at least a portion of a nucleic acid. Probes of the invention refer to nucleic acids which hybridize to the region of interest and which are not further extended. For example, a probe is a nucleic acid which specifically hybridizes to a polymorphic region of a gene, e.g., a gene corresponding to a molecule listed in Tables 4, 6, 7, and 8, and which by hybridization or absence of hybridization to the DNA of a subject or the type of hybrid formed will be indicative of the identity of the allelic variant of the polymorphic region of the gene, e.g., a gene corresponding to a molecule listed in Tables 4, 6, 7, and 8.

[0131] Primers can be complementary to nucleotide sequences located close to each other or further apart, depending on the use of the amplified DNA. For example, primers-can be chosen such that they amplify DNA fragments of at least about 10 nucleotides or as much as several kilobases. Preferably, the primers of the invention will hybridize selectively to nucleotide sequences, e.g., nucleotide sequences corresponding to the molecules listed in Tables 4, 6, 7, and 8, located about 150 to about 350 nucleotides apart.

[0132] For amplifying at least a portion of a nucleic acid, a forward primer (i.e., 5′ primer) and a reverse primer (i.e., 3′ primer) will preferably be used. Forward and reverse primers hybridize to complementary strands of a double stranded nucleic acid, such that upon extension from each primer, a double stranded nucleic acid is amplified.

[0133] Yet other preferred primers of the invention are nucleic acids which are capable of selectively hybridizing to an allelic variant of a polymorphic region of a gene, e.g., a gene corresponding to a molecule listed in Tables 4, 6, 7, and 8. Thus, such primers can be specific for a gene sequence, e.g., a gene sequence corresponding to a molecule listed in Tables 4, 6, 7, and 8, so long as they have a nucleotide sequence which is capable of hybridizing to a gene, e.g., a gene corresponding to a molecule listed in Tables 4, 6, 7, and 8. Such primers can be used, e.g., in sequence specific oligonucleotide priming as described further herein.

[0134] Other preferred primers used in the methods of the invention are nucleic acids which are capable of hybridizing to the reference sequence of a gene, e.g., a gene corresponding to a molecule listed in Tables 4, 6, 7, and 8, thereby detecting the presence of the reference allele of an allelic variant or the absence of a variant allele of an allelic variant in a gene, e.g., a gene corresponding to a molecule listed in Tables 4, 6, 7, and 8. Such primers can be used in combination, e.g., with primers specific for the variant polynucleotide of the gene, e.g., the gene corresponding to a molecule listed in Tables 4, 6, 7, and 8. The sequences of primers specific for the reference sequences comprising the gene, e.g., a gene corresponding to a molecule listed in Tables 4, 6, 7, and 8, will be readily apparent to one of skill in the art.

[0135] The nucleic acids of the invention, e.g., the nucleic acids corresponding to a molecule listed in Tables 4, 6, 7, and 8, can also be used as probes, e.g. in therapeutic and diagnostic assays. For instance, the present invention provides a probe comprising a substantially purified oligonucleotide, which oligonucleotide comprises a region having a nucleotide sequence that is capable of hybridizing specifically to a region of a gene, e.g., a gene corresponding to a molecule listed in Tables 4, 6, 7, and 8, which is polymorphic. In an even more preferred embodiment of the invention, the probes are capable of hybridizing specifically to one allelic variant of a gene, e.g. a gene corresponding to a molecule listed in Tables 4,. 6, 7, and 8, having a nucleotide sequence which differs from the nucleotide sequence set forth in SEQ ID Nos:1, 9, 11, 13, 15, 17, 19, 21, 23, 25, 27, 29, 31, 33, 35, 37, 39, 41, 43, 45, 47, 49, 51, 53, 55, 57, 59, 61, 63, 65, 67, 69, 71, 73, 75, 80, 82, 84, 86, 88, 90, 92, 94, 96, 98, 100, 102, 104, 106, 108, 110, 112, 114, 116, 118, 120, 122, 124, 126, 128, 130, 132, 134, 136, 138, 140, 142, 144, 146, 148, 150, 152, 154, 156, 158, 160, 162, 164, 166, 168, 170, 172, 174, 176, 178, 180, 182, 184, 186, 188, 190, 192, 194, 196, 198, 200, 202, 330, 332, 334, 336, 338, 340, 342, 344, 346, 348, 350, 352, 354, 356, 358, 360, 362, 364, 366, 368, 370, 372, 374, 378, and 380. Such probes can then be used to specifically detect which allelic variant of a polymorphic region of a gene, e.g., a gene corresponding to a molecule listed in Tables 4, 6, 7, and 8, is present in a subject. The polymorphic region can be located in the 3′ UTR, 5′ upstream regulatory element, exon, or intron sequences of a gene, e.g., a gene corresponding to a molecule listed in Tables 4, 6, 7, and 8.

[0136] Particularly, preferred probes of the invention have a number of nucleotides sufficient to allow specific hybridization to the target nucleotide sequence. Where the target nucleotide sequence is present in a large fragment of DNA, such as a genomic DNA fragment of several tens or hundreds of kilobases, the size of the probe may have to be longer to provide sufficiently specific hybridization, as compared to a probe which is used to detect a target sequence which is present in a shorter fragment of DNA. For example, in some diagnostic methods, a portion of a gene corresponding to a molecule listed in Tables 4, 6, 7, and 8 may first be amplified and thus isolated from the rest of the chromosomal DNA and then hybridized to a probe. In such a situation, a shorter probe will likely provide sufficient specificity of hybridization. For example, a probe having a nucleotide sequence of about 10 nucleotides may be sufficient.

[0137] In preferred embodiments, the probe or primer further comprises a label attached thereto, which, e.g., is capable of being detected, e.g. the label group is selected from amongst radioisotopes, fluorescent compounds, enzymes, and enzyme co-factors.

[0138] In a preferred embodiment of the invention, the isolated nucleic acid, which is used, e.g., as a probe or a primer, is modified, so as to be more stable than naturally occurring nucleotides. Exemplary nucleic acid molecules which are modified include phosphoramidate, phosphothioate and methylphosphonate analogs of DNA (see also U.S. Pat. Nos. 5,176,996; 5,264,564; and 5,256,775).

[0139] The nucleic acids of the invention can also be modified at the base moiety, sugar moiety, or phosphate backbone, for example, to improve stability of the molecule. The nucleic acids, e.g., probes or primers, may include other appended groups such as peptides (e.g., for targeting host cell receptors in vivo), or agents facilitating transport across the cell membrane (see, e.g., Letsinger et al., 1989, Proc. Natl. Acad. Sci. U.S.A. 86:6553-6556; Lemaitre et al., 1987, Proc. Natl. Acad. Sci. 84:648-652; PCT Publication No. W088/09810, published Dec. 15, 1988), hybridization-triggered cleavage agents. (See, e.g., Krol et al., 1988, BioTechniques 6:958-976) or intercalating agents (see, e.g., Zon, 1988, Pharm. Res. 5:539-549). To this end, the nucleic acid of the invention may be conjugated to another molecule, e.g., a peptide, hybridization triggered cross-linking agent, transport agent, hybridization-triggered cleavage agent, etc.

[0140] The isolated nucleic acid comprising an intronic sequence, e.g., an intronic sequence corresponding to a molecule listed in Tables 4, 6, 7, and 8, may comprise at least one modified base moiety which is selected from the group including but not limited to 5-fluorouracil, 5-bromouracil, 5-chlorouracil, 5-iodouracil, hypoxanthine, xantine, 4-acetylcytidine, 5-(carboxyhydroxymethyl) uracil, 5-carboxymethylaminomethyl-2-thiouridine, 5-carboxymethylaminomethyluracil, dihydrouracil, beta-D-galactosylqueosine, inosine, N6-isopentenyladenine, 1-methylguanine, 1-methylinosine, 2,2-dimethylguanine, 2-methyladenine, 2-methylguanine, 3-methylcytidine, 5-methylcytidine, N6-adenine, 7-methylguanine, 5-methylaminomethyluracil, 5-methoxyaminomethyl-2-thiouracil, beta-D-mannosylqueosine, 5′-methoxycarboxymethyluracil, 5-methoxyuracil, 2-methylthio-N6-isopentenyladenine, uracil-5-oxyacetic acid (v), wybutoxosine, pseudouracil, queosine, 2-thiocytidine, 5-methyl-2-thiouracil, 2-thiouracil, 4-thiouracil, 5-methyluracil, uracil-5-oxyacetic acid methylester, uracil-5-oxyacetic acid (v), 5-methyl-2-thiouracil, 3-(3-amino-3-N-2-carboxypropyl) uracil, (acp3)w, and 2,6-diaminopurine.

[0141] The isolated nucleic acid may also comprise at least one modified sugar moiety selected from the group including but not limited to arabinose, 2-fluoroarabinose, xylulose, and hexose.

[0142] In yet another embodiment, the nucleic acid comprises at least one modified phosphate backbone selected from the group consisting of a phosphorothioate, a phosphorodithioate, a phosphoramidothioate, a phosphoramidate, a phosphordiamidate, a methylphosphonate, an alkyl phosphotriester, and a formacetal or analog thereof.

[0143] In yet a further embodiment, the nucleic acid is an α-anomeric oligonucleotide. An α-anomeric oligonucleotide forms specific double-stranded hybrids with complementary RNA in which, contrary to the usual β-units, the strands run parallel to each other (Gautier et al., 1987, Nucl. Acids Res. 15:6625-6641). The oligonucleotide is a 2′-0-methylribonucleotide (Inoue et al., 1987, Nucl. Acids Res. 15:6131-6148), or a chimeric RNA-DNA analogue (Inoue et al., 1987, FEBS Lett. 215:327-330).

[0144] Any nucleic acid fragment of the invention can be prepared according to methods well known in the art and described, e.g., in Sambrook, J. Fritsch, E. F., and Maniatis, T. (1989) Molecular Cloning: A Laboratory Manual, Cold Spring Harbor Laboratory Press, Cold Spring Harbor, N.Y. For example, discrete fragments of the DNA can be prepared and cloned using restriction enzymes. Alternatively, discrete fragments can be prepared using the Polymerase Chain Reaction (PCR) using primers having an appropriate sequence.

[0145] Oligonucleotides of the invention may be synthesized by standard methods known in the art, e.g. by use of an automated DNA synthesizer (such as are commercially available from Biosearch, Applied Biosystems, etc.). As examples, phosphorothioate oligonucleotides may be synthesized by the method of Stein et al. (1988, Nucl. Acids Res. 16:3209), methylphosphonate oligonucleotides can be prepared by use of controlled pore glass polymer supports (Sarin et al., 1988, Proc. Natl. Acad. Sci. U.S.A. 85:7448-7451), etc.

[0146] The invention also provides vectors and plasmids comprising the nucleic acids of the invention. For example, in one embodiment, the invention provides a vector comprising at least a portion of a gene comprising a polymorphic region, e.g., a polymorphic region of a gene corresponding to a molecules listed in Tables 4, 6, 7, and 8. Thus, the invention provides vectors for expressing at least a portion of the allelic variants of the human gene reference sequences, e.g., the gene reference sequences corresponding to a molecule listed in Tables 4, 6, 7, and 8, as well as other allelic variants, comprising a nucleotide sequence which is different from the nucleotide sequences disclosed in, GI: 28302128, GI: 21314613, GI: 27886640, GI: 27886641, GI: 27886630, GI: 27886638, GI: 27886634, GI: 27886636, GI: 27886629, GI: 27886632, GI: 33589849, GI: 31982877, GI: 30102932, GI: 23592225, GI:11968153, GI: 7705567, GI: 7657278, GI: 7657276, GI: 7657272, GI: 7657270, GI: 7019440, GI: 6912475, GI: 6912473, GI: 6912471, GI: 5803051, GI: 7657280, GI:17025233, GI: 31543105, GI: 8051602, GI: 8051603, GI: 21614502, GI: 21614516, GI: 20336217, GI: 20336222, GI: 20336218, GI: 20336220, GI: 9966890,GI: 4507020, GI: 7706676, GI: 14456711,GI:14043068, GI:4557558,GI: 4504436,GI:8051607, GI:4502668; GI: 4502670, GI: 4557428, GI: 4557430, GI: 338765, GI: 4885454, GI: 5453610, GI: 23110988, GI: 23110990, GI: 23110986, GI: 32481214, GI: 4502650, GI: 4502684, GI: 11038671,GI:11038673, GI:11038675, GI:40353774,GI:4557416, GI:10834989, GI: 41281936, GI: 7669497, GI: 7669498, GI: 51593094, GI: 51702223, GI: 22095359, GI: 38455384, GI: 45580689, GI: 45580691, GI: 24475618, GI: 28178860, GI: 4502680, GI: 28610152, GI: 26787979, GI:26787983, GI: 26787985, GI: 27894305, GI: 25952110, GI:10834983, GI: 28610153, GI: 45935369, GI: 32483414, GI: 7108343,GI: 7108345,GI:10835170,GI: 10835170,GI:25952110, GI: 6806892, GI: 27437029, GI: 27477090, GI: 27477091, GI: 24430216, GI: 26787977, GI: 24430218, GI: 24497437, GI:13128949, GI: 24430216, GI:10863872, GI: 18201907, GI: 18201908, GI: 48762674, GI: 21265033, GI: 21265042, GI: 21265045, GI: 21265045, GI: 21265048, GI: 14589894, GI: 32306519, GI: 11321596, GI: 4557868, GI: 47132558, GI: 47132546, GI: 47132548, GI: 47132550, GI: 47132552, GI: 47132556, GI: 47132554, GI: 4507894, GI: 4501882, GI: 14589888, GI: 14719826, GI: 13787192, GI: 41152108, GI: 41152108, GI: 4504596, and GI: 13128965. The allelic variants can be expressed in eukaryotic cells, e.g., cells of a subject, e.g., a mammalian subject, or in prokaryotic cells.

[0147] The nucleic acid molecules of the present invention include lineage-specific allelic variants of the, e.g., genes corresponding to a molecule listed in Tables 4, 6, 7, and 8, which differ from the reference sequences set forth in SEQ ID Nos:1, 9, 11, 13, 15, 17, 19, 21, 23, 25, 27, 29, 31, 33, 35, 37, 39, 41,43, 45, 47, 49, 51, 53, 55, 57, 59, 61, 63, 65, 67, 69, 71, 73, 75, 80, 82, 84, 86, 88, 90, 92, 94, 96, 98, 100, 102, 104, 106, 108, 110, 112, 114, 116, 118, 120, 122, 124, 126, 128, 130, 132, 134, 136, 138, 140, 142, 144, 146, 148, 150, 152, 154, 156, 158, 160, 162, 164, 166, 168, 170, 172, 174, 176, 178, 180, 182, 184, 186, 188, 190, 192, 194, 196, 198, 200, 202, 330, 332, 334, 336, 338, 340, 342, 344, 346, 348, 350, 352, 354, 356, 358, 360, 362, 364, 366, 368, 370, 372, 374, 378, and 380, or at least a portion thereof, having a polymorphic region. The preferred nucleic acid molecules of the present invention comprise β-globin sequence having the polymorphisms identified in Table 1 and those listed in Table 9. The invention further comprises isolated nucleic acid molecules complementary to nucleic acid molecules comprising the polymorphisms of the present invention. Nucleic acid molecules of the present invention can function as probes or primers, e.g., in methods for determining the allelic identity of a, e.g., polymorphic region corresponding to a molecule listed in Tables 4, 6, 7, and 8. The nucleic acids of the invention can also be used, either in combination with each other or in combination with other SNPs in the, e.g., genes corresponding to a molecule listed in Tables 4, 6, 7, and 8, or other genes to detect lineage-specific cells or monitor the effectiveness of treatment in a subject. The nucleic acids of the invention can further be used to prepare or express, e.g., genes, polypeptides encoded by specific alleles, such as mutant alleles corresponding to a molecule listed in Tables 4, 6, 7, and 8. Polypeptides encoded by specific alleles, such as mutant alleles corresponding to a molecule listed in Tables 4, 6, 7, and 8, polypeptides, can also be used in therapy or for preparing reagents, e.g., antibodies, for detecting proteins corresponding to a molecule listed in Tables 4, 6, 7, and 8, and proteins encoded by these alleles. Accordingly, such reagents can be used to detect mutant proteins, e.g., mutant proteins corresponding to a molecule listed in Tables 4, 6, 7, and 8.

[0148] The invention also provides isolated nucleic acids comprising at least one polymorphic region of a gene, e.g., a gene corresponding to a molecule listed in Tables 4, 6, 7, and 8, having a nucleotide sequence which differs from the reference nucleotide sequences set forth in SEQ ID Nos: 1, 9, 11, 13, 15, 17, 19, 21, 23, 25, 27, 29, 31, 33, 35, 37, 39, 41, 43, 45, 47, 49, 51, 53, 55, 57, 59, 61, 63, 65, 67, 69, 71, 73, 75, 80, 82, 84, 86, 88, 90, 92, 94, 96, 98, 100, 102, 104, 106, 108, 110, 112, 114, 116, 118, 120, 122, 124, 126, 128, 130, 132, 134, 136, 138, 140, 142, 144, 146, 148, 150, 152, 154, 156, 158, 160, 162, 164, 166, 168, 170, 172, 174, 176, 178, 180, 182, 184, 186, 188, 190, 192, 194, 196, 198, 200, 202, 330, 332, 334, 336, 338, 340, 342, 344, 346, 348, 350, 352, 354, 356, 358, 360, 362, 364, 366, 368, 370, 372, 374, 378, and 380. Preferred nucleic acids can have a polymorphic region in an upstream regulatory element, an exon, an intron, or in the 3′ UTR.

Methods of the Invention

[0149] The invention provides methods for detecting lineage-specific cells by identifying lineage-specific mRNA. In one embodiment of the invention, a method is provided to detect lineage-specific cells in a biological sample including the steps of (a) isolating mRNA from the biological sample; (b) reverse transcribing cDNA from the mRNA; (c) amplifying cDNA; and (d) identifying lineage-specific cDNA in the biological sample. In certain embodiments of the invention, the identification of lineage-specific cells can be used to evaluate various clinical factors, such as ABO incompatibility, and the composition and intensity of the conditioning regimen on functional engraftment of lineage-specific cells.

[0150] In another aspect of the invention, a method is provided to detect lineage-specific cells in a biological sample including the steps of (a) isolating mRNA from the biological sample; (b) reverse transcribing cDNA from the mRNA; (c) amplifying said at least one allelic variant from the cDNA; and (d) identifying at least one lineage-specific allelic variant, e.g., SNP, in the sample. The method may be used to detect donor-derived lineage-specific cells or recipient-derived lineage-specific cells, or both.

[0151] Another aspect of the invention provides a method of quantifying progenitor cell transfer in a subject comprising the steps of (a) obtaining a biological sample prior to said progenitor cell transfer; (b) obtaining a biological sample following said progenitor cell transfer; (c) identifying and quantifying at least one lineage-specific allelic variant in said biological sample obtained in step (a); (d) identifying and quantifying at least one lineage-specific allelic variant in said biological sample obtained in step (b); and (e) comparing the quantity of donor-derived cells and recipient-derived cells in the samples, thereby quantifying progenitor cell transfer in a subject.

[0152] In another aspect of the invention, a method is provided to determine an effective dose of progenitor cell transfer in a subject comprising the steps of; (a) obtaining a biological sample prior to said progenitor cell transfer; (b) obtaining a biological sample following said progenitor cell transfer; (c) identifying and quantifying at least one lineage-specific allelic variant in said biological sample obtained in step (a), thereby quantifying progenitor cell transfer in said biological sample; (d)) identifying and quantifying at least one lineage-specific allelic variant in said biological sample obtained in step (b), thereby quantifying progenitor cell transfer in said biological sample; and (e) comparing the quantity of progenitor cell transfer from step (c) and step (d) to therapy outcome, thereby determining an effective dose of progenitor cell transfer.

[0153] In still other embodiments of the invention the methods are useful for monitoring functional engraftment of lineage-specific cells following progenitor cell transfer in a subject suffering from a disease or disorder, for monitoring immune reconstitution following progenitor cell transfer in a subject, and for determining the clinical outcome of a progenitor cell transfer in a subject. In one embodiment, the presence of at least one donor-derived lineage-specific allelic variant selected from the group listed in Table 7 is an indication of poor outcome, e.g., graft rejection, graft versus host disease, pulmonary hypertension, development of proteinuria and development of progressive renal insufficiency, and/or end-organ failure.

[0154] In another embodiment, the presence of at least one recipient-derived lineage-specific allelic variant selected from the group listed in Table 7 is an indication of favorable outcome, e.g., graft acceptance.

[0155] In another embodiment of the invention, two or more lineage-specific alleleic variants are detected and/or identified.

[0156] Thus, the invention relates to the identification, quantification, and/or detection of lineage-specific allelic variants. Numerous methods are available that can be utilized for both identifying lineage-specific allelic variants and detecting lineage-specific allelic variants. For example, SNPs in a gene of interest, e.g., a gene corresponding to a molecule listed in Tables 4, 6, 7, and 8, can be identified by searching various databases that compile and list SNPs identified through the sequencing efforts of the Human Genome Project. These databases include, but are not limited to, the SNP Consortium, (see, for example, Thorisson G A and Stein L D. (2003) Nucleic Acids Res. 31(1):124-7), SNPper, available through The Innate Immunity Programs for Genomic Applications (IIPGA), which is a collaboration between the Respiratory Sciences Center at the University of Arizona, The Respiratory and Genetics Research Group at the Channing Laboratory at Brigham and Women's Hospital and The Boston Children's Hospital Informatics Program (CHIP), NCBI SNP database (see, for example, Sherry, ST, et al. (1999) Genome Res. 9(8):677-9), the NCI Genetic Annotation Initiative (see, for example, Clifford R., et al. (2000) Genome Res. 10:1259-65), the Whitehead SNP database (see, for example, Wang, D G, et al. (1998) Science 280(5366):1077-82), Jsnps (see, for example, Hirakawa, M., et al. (2002) Nuc. Acids Res. 30(1):158-162), Genesnps, available through the University of Utah Genome Center, Polyphen (see, for example, Sunyaev, S., et al. (2001) Hum Mol Genet 10:591-597), OMIM (see, for example, McKusick, V. A.(1998) Mendelian Inheritance in Man. Catalogs of Human Genes and Genetic Disorders. Baltimore: Johns Hopkins University Press, (12th edition), HGBASE (see, for example, Fredman, D., et al. (2002) Nuc. Acids Res. 30:387-91), Celera (see, for example, Venter, J. C., et al. (2001) Science 291(5507):1304-51), Incyte Genomics Lifeseq database, or any combination thereof.

[0157] The present invention provides methods for identifying lineage-specific allelic variants by determining the molecular structure of a gene, such as a human gene corresponding to a molecule listed in Tables 4, 6, 7, and 8, or a portion thereof. In one embodiment, determining the molecular structure of at least a portion of a gene comprises determining the identity of the lineage-specific allelic variant of at least one polymorphic region of a gene, e.g., a gene corresponding to a molecule listed in Tables 4, 6, 7, and 8 (determining the presence or absence of a lineage-specific allelic variant of SEQ ID Nos: 1, 9, 11, 13, 15, 17, 19, 21, 23, 25, 27, 29, 31, 33, 35, 37, 39, 41, 43, 45, 47, 49, 51, 53, 55, 57, 59, 61, 63, 65, 67, 69, 71, 73, 75, 80, 82, 84, 86, 88, 90, 92, 94, 96, 98, 100, 102, 104, 106, 108, 110, 112, 114, 116, 118, 120, 122, 124, 126, 128, 130, 132, 134, 136, 138, 140, 142, 144, 146, 148, 150, 152, 154, 156, 158, 160, 162, 164, 166, 168, 170, 172, 174, 176, 178, 180, 182, 184, 186, 188, 190, 192, 194, 196, 198, 200, 202, 330, 332, 334, 336, 338, 340, 342, 344, 346, 348, 350, 352, 354, 356, 358, 360, 362, 364, 366, 368, 370, 372, and 374, or the complement thereof). A polymorphic region of a lineage-specific gene can be located in an exon, an intron, at an intron/exon border, or in the 5′ upstream regulatory element of the gene, e.g., a gene corresponding to a molecule listed in Tables 4, 6, 7, and 8.

[0158] In one embodiment, the methods of the invention can be used to identify the presence or absence of a specific lineage-specific allelic variant of one or more polymorphic regions of a gene in a biological sample. The allelic differences can be: (i) a difference in the identity of at least one nucleotide or (ii) a difference in the number of nucleotides, which difference can be a single nucleotide or several nucleotides. The invention also provides methods for detecting differences in a gene such as chromosomal rearrangements, e.g., chromosomal dislocation.

[0159] A preferred detection method is allele specific hybridization using probes overlapping the polymorphic site and having about 5, 10, 20, 25, or 30 nucleotides around the polymorphic region. In a preferred embodiment of the invention, several probes capable of hybridizing specifically to allehic variants are attached to a solid phase support, e.g., a “chip”. Oligonucleotides can be bound to a solid support by a variety of processes, including lithography. For example a chip can hold up to 250,000 oligonucleotides (GeneChip, Affymetrix). Mutation detection analysis using these chips comprising oligonucleotides, also termed “DNA probe arrays” is described e.g. in Cronin et al. (1996) Human Mutation 7:244. In one embodiment, a chip comprises all the allelic variants of at least one polymorphic region of a gene. In another embodiment, a chip comprises one of the allelic variants of at least one polymorphic region of a gene. In still another embodiment, the chip comprises one or more of the allelic variants of at least one polymorphic region of a gene. In one embodiment, the chip comprises a panel of allelic variants of at least one polymorphic region of a gene, such as for example, those variants listed in one or more of the Tables 1 and 9. The solid phase support is then contacted with a test nucleic acid and hybridization to the specific probes is detected. Accordingly, the identity of numerous allelic variants of one or more genes can be identified in a simple hybridization experiment. For example, the identity of the allelic variant of the nucleotide polymorphism in the 5′ upstream regulatory element can be determined in a single hybridization experiment.

[0160] In certain aspects of the methods of the invention, it is necessary to first amplify at least a portion of a gene prior to identifying and/or detecting a lineage-specific allelic variant. Amplification can be performed, e.g., by PCR and/or LCR (see Wu and Wallace, (1989) Genomics 4:560), according to methods known in the art. In one embodiment, DNA and/or RNA of a cell is exposed to two PCR primers and amplification for a number of cycles sufficient to produce the required amount of amplified DNA and/or cDNA. In preferred embodiments, the primers are located between 100 and 350 base pairs apart.

[0161] In some cases, the presence of a lineage-specific allele of a gene in DNA from a subject can be shown by restriction enzyme analysis. For example, a specific nucleotide polymorphism can result in a nucleotide sequence comprising a restriction site which is absent from the nucleotide sequence of another lineage-specific allelic variant.

[0162] In a further embodiment, protection from cleavage agents (such as a nuclease, hydroxylamine or osmium tetroxide and with piperidine) can be used to detect mismatched bases in RNA/RNA DNA/DNA, or RNA/DNA heteroduplexes (Myers, et al. (1985) Science 230:1242). In general, the technique of “mismatch cleavage” starts by providing heteroduplexes formed by hybridizing a control nucleic acid, which is optionally labeled, e.g., RNA or DNA, comprising a nucleotide sequence of an allelic variant with a sample nucleic acid, e.g., RNA or DNA, obtained from a tissue sample. The double-stranded duplexes are treated with an agent which cleaves single-stranded regions of the duplex such as duplexes formed based on base pair mismatches between the control and sample strands. For instance, RNA/DNA duplexes can be treated with RNase and DNA/DNA hybrids treated with S1 nuclease to enzymatically digest the mismatched regions. In other embodiments, either DNA/DNA or RNA/DNA duplexes can be treated with hydroxylamine or osmium tetroxide and with piperidine in order to digest mismatched regions. After digestion of the mismatched regions, the resulting material is then separated by size on denaturing polyacrylamide gels to determine whether the control and sample nucleic acids have an identical nucleotide sequence or in which nucleotides they are different. See, for example, Cotton et al. (1988) Proc. Natl. Acad. Sci., USA 85:4397; Saleeba, et al. (1992) Methods Enzymol. 217:286-295. In a preferred embodiment, the control or sample nucleic acid is labeled for detection.

[0163] In another embodiment, a lineage-specific allelic variant can be identified and/or detected by denaturing high-performance liquid chromatography (DHPLC) (Oefner and Underhill, (1995) Am. J Human Gen. 57:Suppl. A266). DHPLC uses reverse-phase ion-pairing chromatography to detect the heteroduplexes that are generated during amplification of PCR fragments from individuals who are heterozygous at a particular nucleotide locus within that fragment (Oefner and Underhill (1995) Am. J Human Gen. 57:Suppl. A266). In general, PCR products are produced using PCR primers flanking the DNA of interest. DHPLC analysis is carried out and the resulting chromatograms are analyzed to identify base pair alterations or deletions based on specific chromatographic profiles (see O'Donovan, et al. (1998) Genomics 52:44-49).

[0164] In other embodiments, alterations in electrophoretic mobility are used to identify and/or detect the type of lineage-specific allelic variant. For example, single strand conformation polymorphism (SSCP) may be used to detect differences in electrophoretic mobility between mutant and wild type nucleic acids (Orita et al. (1989) Proc. Natl. Acad. Sci., USA 86:2766; see also Cotton (1993) Mutat Res. 285:125-144; and Hayashi (1992) Genet. Anal. Tech. Appl. 9:73-79). Single-stranded DNA fragments of sample and control nucleic acids are denatured and allowed to renature. The secondary structure of single-stranded nucleic acids varies according to sequence, the resulting alteration in electrophoretic mobility enables the detection of even a single base change. The DNA fragments may be labeled or detected with labeled probes. The sensitivity of the assay may be enhanced by using RNA (rather than DNA), in which the secondary structure is more sensitive to a change in sequence. In another preferred embodiment, the subject method utilizes heteroduplex analysis to separate double stranded heteroduplex molecules on the basis of changes in electrophoretic mobility (Keen, et al. (1991) Trends Genet. 7:5).

[0165] In yet another embodiment, the identity of a lineage-specific allelic variant of a polymorphic region is obtained by analyzing the movement of a nucleic acid comprising the polymorphic region in polyacrylamide gels containing a gradient of denaturant is assayed using denaturing gradient gel electrophoresis (DGGE) (Myers, et al. (1985) Nature 313:495). When DGGE is used as the method of analysis, DNA will be modified to insure that it does not completely denature, for example by adding a GC clamp of approximately 40 bp of high-melting GC-rich DNA by PCR. In a further embodiment, a temperature gradient is used in place of a denaturing agent gradient to identify differences in the mobility of control and sample DNA (Rosenbaum and Reissner (1987) Biophys. Chem. 265:1275).

[0166] Other examples of techniques for identifying and/or detecting differences of at least one nucleotide between two nucleic acids include, but are not limited to, selective oligonucleotide hybridization, selective amplification, or selective primer extension. For example, oligonucleotide probes may be prepared in which the known polymorphic nucleotide is placed centrally (allele-specific probes) and then-hybridized to target DNA under conditions which permit hybridization only if a perfect match is found (Saiki, et al. (1986) Nature 324:163); Saiki, et al. (1989) Proc. Natl. Acad. Sci., USA 86:6230; and Wallace, et al. (1979) Nucl. Acids Res. 6:3543). Such lineage-specific allele specific oligonucleotide hybridization techniques may be used for the simultaneous detection of several nucleotide changes in different polymorphic regions of a gene of interest. For example, oligonucleotides having nucleotide sequences of specific lineage-specific allelic variants are attached to a hybridizing membrane and this membrane is then hybridized with labeled sample nucleic acid. Analysis of the hybridization signal will then reveal the identity of the nucleotides of the sample nucleic acid.

[0167] Alternatively, allele specific amplification technology which depends on selective PCR amplification may be used in conjunction with the instant invention. Oligonucleotides used as primers for specific amplification may carry the allelic variant of interest in the center of the molecule (so that amplification depends on differential hybridization) (Gibbs, et al. (1989) Nucleic Acids Res. 17:2437-2448) or at the extreme 3′ end of one primer where, under appropriate conditions, mismatch can prevent, or reduce polymerase extension (Prossner (1993) Tibtech. 11:238; Newton et al. (1989) Nucl. Acids Res. 17:2503). This technique is also termed “PROBE” for Probe Oligo Base Extension. In addition it may be desirable to introduce a novel restriction site in the region of the mutation to create cleavage-based detection (Gasparini, et al. (1992) Mol. Cell Probes 6:1).

[0168] In another embodiment, identification of the lineage-specific allelic variant is carried out using an oligonucleotide ligation assay (OLA), as described, e.g., in U.S. Pat. No. 4,998,617 and in Landegren, U., et al., (1988) Science 241:1077-1080. The OLA protocol uses two oligonucleotides which are designed to be capable of hybridizing to abutting sequences of a single strand of a target. One of the oligonucleotides is linked to a separation marker, e.g., biotinylated, and the other is detectably labeled. If the precise complementary sequence is found in a target molecule, the oligonucleotides will hybridize such that their termini abut, and create a ligation substrate. Ligation then permits the labeled oligonucleotide to be recovered using avidin, or another biotin ligand. Nickerson, D. A., et al. have described a nucleic acid detection assay that combines attributes of PCR and OLA (Nickerson, D. A., et al., (1990) Proc. Natl. Acad. Sci. USA 87:8923-8927. In this method, PCR is used to achieve the exponential amplification of target DNA, which is then detected using OLA.

[0169] Several techniques based on this OLA method have been developed and can be used to detect specific lineage-specific allelic variants of a polymorphic region of a gene. For example, U.S. Pat. No. 5,593,826 discloses an OLA using an oligonucleotide having 3′-amino group and a 5′-phosphorylated oligonucleotide to form a conjugate having a phosphoramidate linkage. In another variation of OLA described in Tobe, et al. (1996) Nucleic Acids Res 24: 3728), OLA combined with PCR permits typing of two alleles in a single microtiter well. By marking each of the allele-specific primers with a unique hapten, i.e. digoxigenin and fluorescein, each OLA reaction can be detected by using hapten specific antibodies that are labeled with different enzyme reporters, alkaline phosphatase or horseradish peroxidase. This system permits the detection of the two alleles using a high throughput format that leads to the production of two different colors.

[0170] Other techniques for the identification of allelic variants, e.g. SNPs, have been developed. These methods utilize matrix-assisted laser desorption/ionization time-of-flight mass spectrometry (MALDI-TOF MS). Several strategies for allele-discrimination (hybridization, cleavage, ligation, and primer extension) have been combined with MALDI-TOF mass spectrometric detection, and all of them allow high-throughput and/or automated genotyping of large numbers of SNPs (for a review, see, e.g., Gut, I. G. (2004) Hum Mutat. 23(5):437-41).

[0171] The invention further provides methods for detecting single nucleotide polymorphisms in a gene. Because single nucleotide polymorphisms constitute sites of variation flanked by regions of invariant sequence, their analysis requires no more than the determination of the identity of the single nucleotide present at the site of variation and it is unnecessary to determine a complete gene sequence for each subject. However, any of the methods described above for detecting lineage-specific allelic variants of a polymorphic region of a gene can also be used to detect single nucleotide polymorphisms in a gene. Nevertheless, several methods have been developed to facilitate the analysis of such single nucleotide polymorphisms.

[0172] In one embodiment, the single base polymorphism can be detected using a specialized exonuclease-resistant nucleotide, as disclosed, e.g., in Mundy, C. R. (U.S. Pat. No. 4,656,127). According to the method, a primer complementary to the allelic sequence immediately 39 to the polymorphic site is permitted to hybridize to a target molecule obtained from a particular animal or human. If the polymorphic site on the target molecule contains a nucleotide that is complementary to the particular exonuclease-resistant nucleotide derivative present, then that derivative will be incorporated onto the end of the hybridized primer. Such incorporation renders the primer resistant to exonuclease, and thereby permits its detection. Since the identity of the exonuclease-resistant derivative of the sample is known, a finding that the primer has become resistant to exonucleases reveals that the nucleotide present in the polymorphic site of the target molecule was complementary to that of the nucleotide derivative used in the reaction. This method has the advantage that it does not require the determination of large amounts of extraneous sequence data.

[0173] In another embodiment of the invention, a solution-based method is used for determining the identity of the nucleotide of a polymnorphic site (Cohen, D., et al. (French Patent 2,650,840; PCT Application No. WO91/02087). As in the Mundy method of U.S. Pat. No. 4,656,127, a primer is employed that is complementary to allelic sequences immediately 3′ to a polymnorphic site. The method determines the identity of the nucleotide of that site using labeled dideoxynucleotide derivatives, which, if complementary to the nucleotide of the polymorphic site will become incorporated onto the terminus of the primer.

[0174] An alternative method, known as Genetic Bit Analysis or GBA™ is described by Goelet, P., et al. (PCT Application No. 92/15712). The method of Goelet, P. et al. uses mixtures of labeled terminators and a primer that is complementary to the sequence 3′ to a polymorphic site. The labeled terminator that is incorporated is thus determined by, and complementary to, the nucleotide present in the polymnorphic site of the target molecule being evaluated. In contrast to the method of Cohen, et al. (French Patent 2,650,840; PCT Appln. No. WO91/02087) the method of Goelet, P., et al. is preferably a heterogeneous phase assay, in which the primer or the target molecule is immobilized to a solid phase.

[0175] Several primer-guided nucleotide incorporation procedures for assaying polymorphic sites in DNA have been described (Komher, J. S., et al., Nucl. Acids. Res. 17:7779-7784 (1989); Sokolov, B. P., Nucl. Acids Res. 18:3671 (1990); Syvanen, A. -C., et al., Genomics 8:684-692 (1990); Kuppuswamy, M. N., et al., Proc. Natl. Acad. Sci., USA 88:1143-1147 (1991); Prezant, T. R., et al., Hum. Mutat. 1:159-164 (1992); Ugozzoli, L., et al., GATA 9:107-112 (1992); Nyren, P., et al., Anal. Biochem. 208:171-175 (1993)). These methods differ from GBA™ in that they all rely on the incorporation of labeled deoxynucleotides to discriminate between bases at a polymorphic site. In such a format, since the signal is proportional to the number of deoxynucleotides incorporated, polymorphisms that occur in runs of the same nucleotide can result in signals that are proportional to the length of the run (Syvanen, A. -C., et al., Amer. J Hum. Genet. 52:46-59 (1993)).

[0176] A number of template dependent processes are available to amplify the target sequences of interest present in a sample. One of the best known amplification methods is the polymerase chain reaction (PCR) which is described in detail in Mullis, et al., U.S. Pat. No. 4,683,195, Mullis, et al., U.S. Pat. No. 4,683,202, and Mullis, et al., U.S. Pat. No. 4,800,159, and in Innis et al., PCR Protocols, Academic Press, Inc., San Diego Calif., 1990. Briefly, in PCR, two primer sequences are prepared which are complementary to regions on opposite complementary strands of the target sequence. An excess of deoxynucleoside triphosphates are added to a reaction mixture along with a DNA polymerase (e.g., Taq polymerase). If the target sequence is present in a sample, the primers will bind to the target and the polymerase will cause the primers to be extended along the target sequence by adding on nucleotides. By raising and lowering the temperature of the reaction mixture, the extended primers will dissociate from the target to form reaction products, excess primers will bind to the target and to the reaction products and the process is repeated. The target of the invention may be genomic DNA, RNA and/or cDNA. Preferably a reverse transcriptase PCR (RT-PCR) amplification procedure is performed to produce cDNA in order to quantify, e.g., measure, the amount of RNA amplified, e.g., assay the level of lineage-specific RNA.

[0177] PCR based methods can include multiplex amplification of a plurality of markers simultaneously. For example, it is well known in the art to select PCR primers to generate PCR products that do not overlap in size and can be analyzed simultaneously. Alternatively, it is possible to amplify different markers with primers that are differentially labeled and thus can each be differentially detected. Other techniques are known in the art to allow multiplex analyses of a plurality of markers.

[0178] PCR has been discussed above as a preferred method of initially amplifying target DNA, RNA and/or cDNA although the skilled person will appreciate that other methods may be used instead of or in combination with PCR. A recent development in amplification techniques which does not require temperature cycling or use of a thermostable polymerase is Self Sustained Sequence Replication (3SR). 3SR is modeled on retroviral replication and may be used for amplification (see for example Gingeras, T. R., et al. Proc. Natl. Acad. Sci., USA 87:1874-1878 and Gingeras, T. R., et al. PCR Methods and Applications Vol. 1, pp 25-33).

[0179] Alternative amplification methods include: self sustained sequence replication (Guatelli, J. C., et al., 1990, Proc. Natl. Acad. Sci. USA 87:1874-1878), transcriptional amplification system (Kwoh, D. Y., et al., 1989, Proc. Natl. Acad. Sci. USA 86:1173-1177), Q-Beta Replicase (Lizardi, P. M., et al., 1988, Biol. Technology 6:1197), and self-sustained sequence replication (Guatelli et al., (1989) Proc. Nat. Acad. Sci., USA 87:1874), and nucleic acid based sequence amplification (NABSA), or any other nucleic acid amplification method, followed by the detection of the amplified molecules using techniques well known to those of skill in the art. These detection schemes are especially useful for the detection of nucleic acid molecules if such molecules are present in very low numbers.

[0180] Amplification products may be assayed and/or detected in a variety of ways, including size analysis, restriction digestion followed by size analysis, detecting specific tagged oligonucleotide primers in the reaction products, allele-specific oligonucleotide (ASO) hybridization, allele specific 5′ exonuclease detection, hybridization, sequencing, and the like. For determining the identity of the allelic variant of a polymorphic region located in the coding region of a gene corresponding to, for example, the genes corresponding to the molecules listed in Tables 4, 6, 7, and 8, yet other methods than those described above can be used. For example, identification of an allelic variant which encodes a mutated protein, e.g., a mutated protein corresponding to a molecule listed in Tables 4, 6, 7, and 8, can be performed by using an antibody specifically recognizing the mutant protein in, e.g., immunohistochemistry or immunoprecipitation. Antibodies to wild-type or mutated forms of the proteins can be prepared according to methods known in the art.

[0181] Alternatively, one can also measure an activity of a protein, such as binding to a ligand. Binding assays are known in the art and involve, e.g., obtaining cells from a subject, and performing binding experiments with a labeled lipid, to determine whether binding to the mutated form of the protein differs from binding to the wild-type of the protein.

[0182] The methods described herein may be performed, for example, by utilizing pre-packaged diagnostic kits, such as those described above, comprising at least one probe or primer nucleic acid described herein, which may be conveniently used, e.g., to determine whether a subject has or is at risk of developing a disease associated with a specific allelic variant.

[0183] Sample nucleic acid to be analyzed by any of the above-described methods can be obtained from any cell type or tissue of a subject. For example, a subject's bodily fluid (e.g. blood) can be obtained by known techniques (e.g. venipuncture). Alternatively, nucleic acid tests can be performed on dry samples (e.g. hair or skin). Fetal nucleic acid samples can be obtained from maternal blood as described in International Patent Application No. WO91/07660 to Bianchi.

[0184] Another aspect of the invention pertains to the use of isolated nucleic acid molecules which are antisense to the nucleotide sequences of SEQ ID Nos: 1, 9, 11, 13, 15, 17, 19, 21, 23, 25, 27, 29, 31, 33, 35, 37, 39, 41, 43, 45, 47, 49, 51, 53, 55, 57, 59, 61, 63, 65, 67, 69, 71, 73, 75, 80, 82, 84, 86, 88, 90, 92, 94, 96, 98, 100, 102, 104, 106, 108, 110, 112, 114, 116, 118, 120, 122, 124, 126, 128, 130, 132, 134, 136, 138, 140, 142, 144, 146, 148, 150, 152, 154, 156, 158, 160, 162, 164, 166, 168, 170, 172, 174, 176, 178, 180, 182, 184, 186, 188, 190, 192, 194, 196, 198, 200, 202, 330, 332, 334, 336, 338, 340, 342, 344, 346, 348, 350, 352, 354, 356, 358, 360, 362, 364, 366, 368, 370, 372, 374, 378, and 380. An “antisense” nucleic acid comprises a nucleotide sequence which is complementary to a “sense” nucleic acid encoding a protein, e.g., complementary to the coding strand of a double-stranded cDNA molecule or complementary to an mRNA sequence. Accordingly, an antisense nucleic acid can hydrogen bond to a sense nucleic acid. The antisense nucleic acid can be complementary to an entire coding strand, e.g., the entire coding strand corresponding to a molecule listed in Tables 4, 6, 7, and 8, or to only a portion thereof In one embodiment, an antisense nucleic acid molecule is antisense to a “coding region” of the coding strand of a nucleotide sequence encoding a gene, e.g., a gene corresponding to a molecule listed in Tables 4, 6, 7, and 8. The term “coding region” refers to the region of the nucleotide sequence comprising codons which are translated into amino acid residues. In another embodiment, the antisense nucleic acid molecule is antisense to a “noncoding region” of the coding strand of a nucleotide sequence encoding, e.g., a molecule listed in Tables 4, 6, 7, and 8. The term “noncoding region” refers to 5′ and 3′ sequences which flank the coding region that are not translated into amino acids (also referred to as 5′ and 3′ untranslated regions).

[0185] Given the coding strand sequences encoding, e.g. a molecule listed in Tables 4, 6, 7, and 8, disclosed herein, antisense nucleic acids of the invention can be designed according to the rules of Watson and Crick base pairing. The antisense nucleic acid molecule can be complementary to the entire coding region of a mRNA, e.g., a mRNA corresponding to the molecules listed in Tables 4, 6, 7, and 8, but more preferably is an oligonucleotide which is antisense to only a portion of the coding or noncoding region of, e.g., mRNA corresponding to a molecule listed in Tables 4, 6, 7, and 8. For example, the antisense oligonucleotide can be complementary to the region surrounding the translation start site of, e.g. mRNA corresponding to a molecule listed in Tables 4, 6, 7, and 8. An antisense oligonucleotide can be, for example, about 5, 10, 15, 20, 25, 30, 35, 40, 45 or 50 nucleotides in length. An antisense nucleic acid of the invention can be constructed using chemical synthesis and enzymatic ligation reactions using procedures known in the art. For example, an antisense nucleic acid (e.g. an antisense oligonucleotide) can be chemically synthesized using naturally occurring nucleotides or variously modified nucleotides designed to increase the biological stability of the molecules or to increase the physical stability of the duplex formed between the antisense and sense nucleic acids, e.g. phosphorothioate derivatives and acridine substituted nucleotides can be used. Examples of modified nucleotides which can be used to generate the antisense nucleic acid include 5-fluorouracil, 5-bromouracil, 5-chlorouracil, 5-iodouracil, hypoxanthine, xantine, 4-acetylcytosine, 5-(carboxyhydroxylmethyl)uracil, 5-carboxymethylaminomethyl-2-thiouridine, 5-carboxymethylaminomethyluracil, dihydrouracil, beta-D-galactosylqueosine, inosine, N6-isopentenyladenine, 1-methylguanine, 1-methylinosine, 2,2-dimethylguanine, 2-methyladenine, 2-methylguanine, 3-methylcytosine, 5-methylcytosine, N6-adenine, 7-methylguanine, 5-methylaminomethyluracil, 5-methoxyaminomethyl-2-thiouracil, beta-D-mannosylqueosine, 5′-methoxycarboxymethyluracil, 5-methoxyuracil, 2-methylthio-N6-isopentenyladenine, uracil-5-oxyacetic acid (v), wybutoxosine, pseudouracil, queosine, 2-thiocytosine, 5-methyl-2-thiouracil, 2-thiouracil, 4-thiouracil, 5-methyluracil, uracil-5-oxyacetic acid methylester, uracil-5-oxyacetic acid (v), 5-methyl-2-thiouracil, 3-(3-amino-3-N-2-carboxypropyl) uracil, (acp3)w, and 2,6-diaminopurine. Alternatively, the antisense nucleic acid can be produced biologically using an expression vector into which a nucleic acid has been subcloned in an antisense orientation (ie., RNA transcribed from the inserted nucleic acid will be of an antisense orientation to a target nucleic acid of interest).

[0186] In yet another embodiment, identifying and/or detecting allelic variants, e.g., lineage-specific allelic variants, may be accomplished by any of a variety of sequencing reactions known in the art to directly sequence a gene of interest or a fragment thereof, generated by the methods of the invention. By comparing the sequence of the sample sequence, e.g., a biological sample isolated from a subject, e.g., a recipient, and comparing that sequence with the corresponding reference (control) sequence e.g., the nucleotide sequences set forth in SEQ ID Nos:1, 9, 11, 13, 15, 17, 19, 21, 23, 25, 27, 29, 31, 33, 35, 37, 39, 41, 43, 45,47, 49, 51, 53, 55, 57, 59, 61, 63, 65, 67, 69, 71, 73, 75, 80, 82, 84, 86, 88, 90, 92, 94, 96, 98, 100, 102, 104, 106, 108, 110, 112, 114, 116, 118, 120, 122, 124, 126, 128, 130, 132, 134, 136, 138, 140, 142, 144, 146, 148, 150, 152, 154, 156, 158, 160, 162, 164, 166, 168, 170, 172, 174, 176, 178, 180, 182, 184, 186, 188, 190, 192, 194, 196, 198, 200, 202, 330, 332, 334, 336, 338, 340, 342, 344, 346, 348, 350, 352, 354, 356, 358, 360, 362, 364, 366, 368, 370, 372, 374, 378, and 380, or alternatively the nucleotide sequence of the donor, it may be determined whether an allelic variant is identified, or as a method to evaluate the effectiveness or clinical outcome of progenitor cell transfer. Exemplary sequencing reactions include those based on techniques developed by Maxam and Gilbert (Proc. Natl. Acad. Sci., USA (1977) 74:560) or Sanger (Sanger et al. (1977) Proc. Nat. Acad. Sci., USA 74:5463). It is also contemplated that any of a variety of automated sequencing procedures may be utilized when performing the subject assays (Biotechniques (1995) 19:448), including sequencing by mass spectrometry (see, for example, U.S. Pat. No. 5,547,835 and international patent application Publication Number WO 94/16101, entitled DNA Sequencing by Mass Spectrometry by H. Köster; U.S. Pat. No. 5,547,835 and international patent application Publication Number WO 94/21822 entitled “DNA Sequencing by Mass Spectrometry Via Exonuclease Degradation” by H. Köster), and U.S. Pat. No.5,605,798 and International Patent Application No. PCT/US96/03651 entitled DNA Diagnostics Based on Mass Spectrometry by H. Köster; Cohen et al. (1996) Adv Chromatogr 36:127-162; and Griffin et al. (1993) Appl Biochem Biotechnol 38:147-159). It will be evident to one skilled in the art that, for certain embodiments, the occurrence of only one, two or three of the nucleic acid bases need be determined in the sequencing reaction. For instance, A-track or the like, e.g., where only one nucleotide is detected, can be carried out.

[0187] Yet other sequencing methods are disclosed, e.g., in U.S. Pat. No. 5,580,732 entitled “Method of DNA sequencing employing a mixed DNA-polymer chain probe” and U.S. Pat. No. 5,571,676 entitled “Method for mismatch-directed in vitro DNA sequencing”.

[0188] A preferred sequencing method is disclosed, e.g., in U.S. Pat. No. 6,258,568 entitled “Method of sequencing DNA based on the detection of the release of pyrophosphate and enzymatic nucleotide degradation”, referred to herein as “pyrosequencing”.

Clinical Course of Therapy

[0189] The invention thus relates to methods for identifying lineage-specific variants identified as described herein in combination with each other or in combination with other lineage-specific allelic variants in a gene of interest. The lineage-specific allelic variants may be further utilized to determine the most appropriate and effective clinical course of therapy for a subject and/or to determine or predict clinical outcome of a subject, e.g., following transplantation. Accordingly, the methods of the invention are particularly useful in monitoring the effectiveness of progenitor cell (e.g., transgenic cell or stem cell, e.g., bone marrow-derived stem cell and/or hematopoietic stem cell) transfer. In one embodiment, a method is featured to monitor the effectiveness of progenitor cell transfer in a subject, e.g., a mammal, such as a human, by identifying lineage-specific mRNA in the subject.

[0190] In another embodiment, the present invention provides a method for monitoring, e.g., evaluating, the effectiveness of progenitor cell transfer in a subject suffering from a disease or disorder comprising the steps of obtaining a biological sample from said subject and identifying lineage-specific mRNA in said biological sample. In another embodiment, functional engraftment of lineage-specific cells is monitored.

[0191] The methods of the invention may be utilized in a subject suffering from any disease or disorder which would benefit from progenitor cell transfer, including, but not limited to, stem cell therapy, e.g., embryonic stem cell therapy. In one embodiment, the disease or disorder is selected from the group consisting of hemoglobinopathies, e.g., thalassemias, sickle cell anemia, hemolytic anemia, hereditary elliptdcytosis, hereditary stomatocytosis, Chronic Granulomatous Disease, Chediak-Higashi syndrome, myelodysplasia, acute erythroleukemia, Kostmann's syndrome, infant malignant osteopetrosis, severe combined immunodeficiency, Wiskott-Aldrich syndrome, aplastic anemia, Blackfan Diamond anemia, Gaucher's disease, Hurler's syndrome, Hunter's syndrome, infantile metachromatic leukodystrophy, autoimmune disorders; and, any disease or disorder that would benefit from treatment by gene therapy, for example, Cystic Fibrosis, hemophilia, Gaucher's disease, numerous cancers associated with oncogenes, such as, breast, prostate, and colon cancer, diabetes mellitus, and organ failure or injury, e.g., cardiac, brain, lung, liver, renal, prostate or pancreas organ failure or injury.

[0192] In another embodiment, the methods of the invention may be utilized in a subject suffering from cognitive and neurodegenerative disorders, such as, for example, Alzheimer's disease, dementias related to Alzheimer's disease (such as Pick's disease), Parkinson's and other Lewy diffuse body diseases, senile dementia, Huntington's disease, Gilles de la Tourette's syndrome, musculoskeletal diseases, multiple sclerosis, amyotrophic lateral sclerosis, progressive supranuclear palsy, epilepsy, and Jakob-Creutzfieldt disease. Additional diseases and disorders which may benefit from progenitor cell transfer, e.g., stem cell therapy, are described in, for example, Roybon L, et al. (2004) Cell Tissue Res. August 11 [epub ahead of print]; McKay R D (2004) B Biol Sci. 359(1445):851-6; Lindvall O, et al. (2004) Nat Med. 10 Suppl:S42-50; Atala A.(2004) Rejuvenation Res. 7(1):15-31; Hussain M A, Theise N D. (2004) Lancet 364(9429):203-5; Silani V, et al. (2004) Lancet. 364(9429):200-2; Mathur A, Martin J F. (2004) Lancet 364(9429):183-92; and Rice C M, Scolding N J. (2004) Lancet 364(9429):193-9; Taguchi, et al. (2004) J. of Clin. Invest. 114(3):330; and Neuringer et al. (2004) Respiratory Research 20 Jul. 2004; 5:6; Peterson (2004) J. of Clin. Invest. 114(3):312, the entire contents of which are incorporated herein by reference.

[0193] The methods described herein can be used alone, or in combination with other clinical/diagnostic methods, including but not limited to implementation of lifestyle changes (e.g., changes in diet or environment), administration of medication, e.g., immunosuppressive agents, cellular therapy, such as lymphocyte infusion, use of medical devices, or, surgical procedures, cell transplantation, e.g., allogenic or autologous, e.g. myeloablative or nonmyeloablative, administration of a therapeutic agent to an isolated cell or tissue or cell line from a subject, or any combination thereof. Information obtained using the methods described herein alone or in combination with information from other diagnostic analyses is useful for determining subsequent clinical courses of action. For example, a method to quantify lineage-specific chimerism following progenitor cell transplantation for treatment of disease or disorders, for example but not limited to, hemoglobinopathies would provide a means of determining what percent of donor derived lineage-specific cells, e.g., transgenic cells or stem cells, e.g., bone marrow-derived stem cells and/or hematopoietic stem cells, are needed in order to correct the symptoms related to the disease or disorder, e.g., hemoglobinopathy.

[0194] If, for example, a subject has received a progenitor cell transfer for the treatment of a sickle cell syndrome, and it is determined that the level of lineage-specific RNA is inadequate to alleviate disease symptoms and promote erythropoiesis, a second transfer of stem cells or an infusion of donor lymphocytes may be indicated. It may also be determined that the level of lymphoid and/or myeloid cells is insufficient to prevent, for example, infection, and thus a second transfer of stem cells or an infusion of donor lymphocytes may be indicated. For example, if the level of donor erythropoiesis was decreasing on serial chimerism measurements, e.g., serial determinations of quantifying lineage-specific cells, then additional treatment would be desired in an to attempt to alleviate disease symptoms and promote erythropoiesis. Alternatively, no further progenitor cell transfer may be indicated if the level of lineage-specific RNA is adequate to alleviate disease symptoms and promote, for example, immune cell function and/or erythropoiesis. It will be recognized that the methods described in the present application are useful to continuously monitor the level of lineage-specific chimerism at multiple-time intervals following transplantation, including but not limited to, 1, 10, 20, 30, 40, 60, 80, 100, 150, 200, 250, 300 days, or 1, 2, 3, 5, 7, 10, 15, 20, 25, 30, 35, 40, 45, 50, 75, 100 years.

Arrays

[0195] The methods of the invention may be carried out using chip-based or array-based methods, wherein a panel of allelic variants, e.g., two or more allelic variants, or SNPs, are identified, detected, and/or quantified. As used herein, the terms “array” or “chip”, used interchangeably herein, represent an intentionally created collection of molecules which can be prepared either synthetically or biosynthetically. In particular, the term “array” as used herein means an intentionally created collection of peptides, proteins, oligonucleotides or polynucleotides attached to at least a first surface of at least one substrate wherein the identity of each molecule at a given predefined region is known.

[0196] To create the arrays of the invention, single-stranded nucleic acid molecules, e.g., polynucleotide probes, can be spotted onto a substrate in a two-dimensional matrix or array. Each single-stranded polynucleotide probe can comprise at least 5, 10, 15, 20, 25, 30, 35, 40, or 50 or more contiguous nucleotides. In one embodiment, the polynucleotide probes can be selected from the nucleotide sequences shown in Tables 1 or 9.

[0197] The invention also includes an array comprising a molecule of the present invention e.g., some or all of the sets of molecules set forth in Tables 4, 6, 7, and 8, complements or fragments thereof. The array can be used to assay expression of one or more genes in the array. In one embodiment, the array can be used to detect and/or identify lineage-specific allelic variants, which is useful to determine a clinical course of therapy, determining immune cell reconstitution, and/or clinical outcome in a subject, following progenitor cell transfer, as described above.

[0198] A. Preparation of Arrays

[0199] Arrays are known in the art and consist of a surface to which probes that correspond in sequence to gene products (e.g., cDNAs, mRNAs, cRNAs, polypeptides, and fragments thereof), can be specifically hybridized or bound at a known position. In one embodiment, the array is a matrix in which each position represents a discrete binding site for a product encoded by a gene (e.g., a protein or RNA), and in which binding sites are present for products of most or almost all of the genes in the organism's genome. In one embodiment, the “binding site” (hereinafter, “site”) is a nucleic acid or nucleic acid analogue to which a particular cognate cDNA can specifically hybridize. The nucleic acid or analogue of the binding site can be, e.g., a synthetic oligomer, a full-length cDNA, a less-than full length cDNA, or a gene fragment.

[0200] B. Preparing Nucleic Acid Molecules for Arrays

[0201] As noted above, the “binding site” to which a particular cognate cDNA specifically hybridizes is usually a nucleic acid or nucleic acid analogue attached at that binding site. These DNAs can be obtained by, e.g., polymerase chain reaction (PCR) amplification of gene segments from genomic DNA, cDNA (e.g., by RT-PCR), or cloned sequences. PCR primers are chosen, based on the known sequence of the genes or cDNA, that result in amplification of unique fragments (i.e., fragments that do not share more than 10 bases of contiguous identical sequence with any other fragment on the array). Computer programs are useful in the design of primers with the required specificity and optimal amplification properties. See, e.g., Oligo version 5.0 (National Biosciences™). In the case of binding sites corresponding to very long genes, it will sometimes be desirable to amplify segments near the 3′ end of the gene so that when oligo-dT primed cDNA probes are hybridized to the array, less-than-full length probes will bind efficiently. Typically each gene fragment on the array will be between about 50 bp and about 2000 bp, more typically between about 100 bp and about 1000 bp, and usually between about 300 bp and about 800 bp in length. PCR methods are well known and are described, for example, in Innis et al. eds., 1990, PCR Protocols: A Guide to Methods and Applications, Academic Press Inc. San Diego, Calif., which is incorporated by reference in its entirety. It will be apparent-that computer controlled robotic systems are useful for isolating and amplifying nucleic acids.

[0202] An alternative means for generating the nucleic acid molecules for the array is by synthesis of synthetic polynucleotides or oligonucleotides, e.g., using N-phosphonate or phosphoramidite chemistries (Froehier et al. (1986) Nucleic Acid Res 14:5399-5407; McBride et al. (1983) Tetrahedron Lett. 24:245-248). Synthetic sequences are between about 15 and about 500 bases in length, more typically between about 20 and about 50 bases. In some embodiments, synthetic nucleic acids include non-natural bases, e.g., inosine. As noted above, nucleic acid molecule analogues may be used as binding sites for hybridization. An example of a suitable nucleic acid analogue is peptide nucleic acid (see, e.g., Egholm et al. (1993) Nature 365:566-568; see also U.S. Pat. No. 5,539,083).

[0203] In an alternative embodiment, the binding (hybridization) sites are made from plasmid or phage clones of genes, cDNAs (e.g., expressed sequence tags), or inserts therefrom (Nguyen et al. (1995) Genomics 29:207-209). In yet another embodiment, the polynucleotide of the binding sites is RNA.

[0204] C. Attaching Nucleic Acid Molecules to the Solid Surface

[0205] The nucleic acid molecule or analogue are attached to a solid support, which may be made from glass, plastic (e.g., polypropylene, nylon), polyacrylamide, nitrocellulose, or other materials. An example of a method for attaching the nucleic acid molecules to a surface is by printing on glass plates, as is described generally by Schena et al. (1995) Science 270:467-470, the contents of which are expressly incorporated herein by reference. This method is especially useful-for preparing arrays of cDNA. See also DeRisi et al. (1996) Nature Genetics 14:457-460; Shalon et al. (1996) Genome Res. 6:639-645; and Schena et al. (1995) Proc. Natl. Acad. Sci. USA 93:10539-11286. Each of the aforementioned articles is incorporated by reference in its entirety.

[0206] A second example of a method for making arrays is by making high-density oligonucleotide arrays. Techniques are known for producing arrays containing thousands of oligonucleotides complementary to defined sequences, at defined locations on a surface using photolithographic techniques for synthesis in situ (see, Fodor et al., (1991) Science 251:767-773; Pease et al., (1994) Proc. Natl. Acad. Sci. USA 91:5022-5026; Lockhart et al. (1996) Nature Biotech 14:1675; U.S. Pat. Nos. 5,578,832; 5,556,752; and 5,510,270, each of which is incorporated by reference in its entirety for all purposes) or other methods for rapid synthesis and deposition of defined oligonucleotides (Blanchard et al. (1996) Biosensors & Bioelectronics 11: 687-90). When these methods are used, oligonucleotides (e.g., 20-mers) of known sequence are synthesized directly on a surface such as a derivatized glass slide. In one embodiment, the array produced is redundant, with several oligonucleotide molecules per RNA. Oligonucleotide probes can be chosen to detect alternatively spliced mRNAs.

[0207] Other methods for making arrays, e.g., by masking (Maskos and Southern, 1992, Nuc. Acids Res. 20:1679-1684), may also be used. In principal, any type of array, for example, dot blots on a nylon hybridization membrane (see Sambrook et al., Molecular Cloning—A Laboratory Manual (2nd Ed.), Vol. 1-3, Cold Spring Harbor Laboratory, Cold Spring Harbor, N.Y., 1989, which is hereby incorporated in its entirety), could be used, although, as will be recognized by those of skill in the art, very small arrays will be preferred because hybridization volumes will be smaller.

[0208] Another method for making arrays is to directly deposit the probe on to the array surface. In such an embodiment probes will bind non-covalently or covalently to the array depending on the surface of the array and characteristics of the probe. In preferred embodiments the array has an epoxy coating on top of a glass microscope slide and the probe is modified at the amino terminal by an amine group. This combination of array surface and probe modification results in the covalent binding of the probe. Other methods of coating the array surface include using acrylamide, sialinization and nitrocellulose. There are several methods for direct deposit of the probes on to the array surface. In one embodiment, the probes are deposited using a pin dispense technique. In this technique, pins deposit probes onto the surface either using contact or non-contact printing. One preferred embodiment is non-contact printing using quill tip pins. Another embodiment uses piezo electric dispensing to deposit the probes.

[0209] Control composition may be present on the array including compositions comprising oligonucleotides or polynucleotides corresponding to genomic DNA, housekeeping genes, negative and positive control genes, and the like. These latter types of compositions are not “unique”, i.e., they are “common.” In other words, they are calibrating or control genes whose function is not to tell whether a particular “key” gene of interest is expressed, but rather to provide other useful information, such as background or basal level of expression. The percentage of samples which are made of unique oligonucleotides or polynucleotide that correspond to the same type of gene is generally at least about 30%, and usually at least about 60% and more usually at least about 80%.

Kits

[0210] The present invention also features kits to identify lineage-specific mRNA. In one embodiment, the kit comprises primers for the amplification of lineage-specific mRNA and instructions for use of those primers to identify lineage-specific mRNA. In one embodiment, the primers correspond to those in SEQ ID Nos. 3 and 5. In another embodiment, the primers correspond to those in SEQ ID Nos. 6 and 8. The kit may comprise a box or container that holds the components of the kit. The box or container is affixed with a label or a Food and Drug Administration approved protocol. The box or container holds components of the invention that are preferably contained within plastic, polyethylene, polypropylene, ethylene, or propylene vessels. The vessels can be capped-tubes or bottles.

[0211] In one embodiment, kits are provided that comprise at least one probe or primer which is capable of specifically hybridizing under stringent conditions to one or more polymorphic regions, e.g., one or more polymorphic regions corresponding to a molecule listed in Tables 4, 6, 7, and 8, and instructions for use. The kits may comprise at least one of nucleic acids of SEQ ID Nos: 3-8. Preferred kits for amplifying at least a portion of a gene, e.g., a gene corresponding to a molecule listed in Tables 4, 6, 7, and 8, comprise at least two primers, at least one of which is capable of hybridizing to a lineage-specific allelic variant sequence.

[0212] The kits of the invention can also comprise one or more control nucleic acids or reference nucleic acids, such as nucleic acids comprising an intronic sequence, e.g., an intronic sequence corresponding to a molecule listed in Tables 4, 6, 7, and 8. For example, a kit can comprise primers for amplifying a polymorphic region of a gene and a control DNA corresponding to such an amplified DNA and having the nucleotide sequence of a specific lineage-specific allelic variant. Thus, direct comparison can be performed between the DNA amplified from a subject and the DNA having the nucleotide sequence of a lineage-specific allelic variant. In one embodiment, the control nucleic acid comprises at least a portion of a gene corresponding to a molecule listed in Tables 4, 6, 7, and 8 of an individual who does not have a disease associated with an allelic variant of a gene listed in Tables 4, 6, 7, and 8, or a disease or disorder associated with an aberrant activity of a protein encoded by a gene corresponding to the molecules listed in Tables 4, 6, 7, and 8.

[0213] Yet other kits of the invention comprise at least one reagent necessary to perform the assay. For example, the kit can comprise an enzyme. Alternatively the kit can comprise a buffer or any other necessary reagents.

[0214] In another embodiment, the invention provides a kit for amplifying and/or for determining the molecular structure of at least a portion of a gene, e.g., a gene corresponding to a molecule listed in Tables 4, 6, 7, and 8, comprising a probe or primer capable of hybridizing to a gene and instructions for use. In one embodiment, determining the molecular structure of a region of a gene comprises determining the identity of the allelic variant of the polymorphic region. Determining the molecular structure of at least a portion of a gene can comprise determining the identity of at least one nucleotide or determining the nucleotide composition, e.g., the nucleotide sequence of a gene corresponding to a molecule listed in Tables 4, 6, 7, and 8.

[0215] The kit may, optionally, also include DNA sampling means. DNA sampling means are well known to one of skill in the art and can include, but not be limited to substrates, such as filter papers, the AmpliCard™. (University of Sheffield, Sheffield, England S10 2JF; Tarlow, J W, et al., J. Invest. Dernatol. 103:387-389 (1994)) and the like; RNA purification reagents, lysis buffers, proteinase solutions and the like; RT- and PCR reagents, such as 10× reaction buffers, reverse transcriptase, thermostable polymerase, dNTPs, and the like; and allele detection means such as the HinfI restriction enzyme, allele specific oligonucleotides, degenerate oligonucleotide primers for nested PCR. PCR amplification oligonucleotides should hybridize between 25 and 2500 base pairs apart, preferably between about 100 and about 500 bases apart, in order to produce a PCR product of convenient size for subsequent analysis. The assay kit and method may also employ labeled oligonucleotides to allow ease of identification in the assays, e.g., sequencing, e.g., pyrosequencing. Examples of labels which may be employed include radio-labels, enzymes, fluorescent compounds, streptavidin, avidin, biotin, magnetic moieties, metal binding moieties, antigen or antibody moieties, and the like.

### EXAMPLES

[0216] This invention is further illustrated by the following examples which should not be construed as limiting. The contents of all references, sequence listing, figures, Accession Numbers, patents and published patent applications cited throughout this application are hereby incorporated by reference.

### Example 1

### Methods to Quantify Engraftment of Donor Cells in Hematopoietic Cell Lineages Following Stem Cell Transplantation

A. Materials and Methods

Subject Samples and Cell Preparation

[0217] Heparinized blood samples from subjects were obtained prior to and at various times post-transplant, upon enrollment into IRB approved research protocols. Peripheral blood mononuclear cells (PBMC) from normal donors and subjects were isolated by Ficoll/Hypaque density gradient centrifugation, cryopreserved with 10% DMSO and stored in vapor phase liquid nitrogen until the time of analysis.

RNA Extraction and Reverse Transcription

[0218] RNA was extracted from 20×10⁶ PBMC by the single-step acid guanidinium thiocyanate/phenol/chloroform method (Trizol) according to the manufacturer's protocol (Invitrogen, Carlsbad, Calif.). First-strand cDNA was generated from 2 μg of total RNA using random hexanucleofides (Pharmacia LKB Biotechnology Inc., Picscataway, N.J.) and reverse transcriptase (Superscript; GIBCO BRL, Gaithersburg, Md.).

Genomic DNA Extraction

[0219] Genomic DNA was extracted from 1-3×10⁶ PBMC or bone marrow mononuclear cells according to the manufacturer's protocol (Wizard Genomic DNA Purification Kit, Promega, Madison, Wis.). Prior to amplification, all DNA samples were quantified by ultraviolet (UV) spectrophotometry and diluted to working concentrations.

PCR of the Sickle Mutation and Hemoglobin Polymorphisms

[0220] The nucleotide sequence of the isolated human β-globin cDNA and the predicted amino acid sequence of the human β-globin polypeptide are shown in SEQ ID NOs: 1 and 2, respectively. The nucleotide sequence of β-globin is also described in GenBank Accession No. GI: 28302128 (SEQ ID NO:1) (the contents of which are included herein by reference). A β-globin locus polymorphism (H3H) was identified from public databases at the NCI Genetic Annotation Initiative (see, for example, Clifford R., et al. (2000) Genome Res. 10:1259-65), available through GenBank. PCR primers were designed to flank the H3H polymorphism, which is a T to C silent substitution at nucleotide position 59, codon 3, of SEQ ID NO:1 or the sickle cell mutation, which is an A to T substitution at nucleotide position 70, codon 7, resulting in a Glutamic acid (E) to Valine (V) amino acid change. PCR primers were optimized for Mg concentration and annealing temperature (Table 1). For each set of primers, one of the primers was biotinylated for the pyrosequencing reaction (see below). Each 50 μl reaction mixture contained 3 μl of cDNA and the following concentrations of other components: 1× Taq Gold buffer (Applied Biosystems, Foster City, Calif.), MgCl₂ (in the concentration specified in Table 1), 400 nmol each primer, 200 nmol DATP, dCTP, dGTP, dTTP, and 2 units AmpliTaq Gold DNA polymerase (Applied Biosystems, Foster City, Calif.). One cycle of denaturation (95° C. for 10 min) was followed by 46 cycles of PCR (94° C. for 30 s, 55° C. for 30 s, 72° C. for 30 s), and finally extension at 72° C. for 10 minutes.

TABLE 1
Primers and probes used to amplify β-globin polymorphisms

| | | | | |
|---|---|---|---|---|
| Polymorphism/ | Amplicon | | Annealing | Mg |
| mutation | size | primer sequence | temp | conc. |

| | | | | | | |
|---|---|---|---|---|---|---|
| Template | Nucleotide | AA | (bp) | (5′-3′) | (° C.) | (mM) |

| | | | | | | |
|---|---|---|---|---|---|---|
| β-globin | A->T | E7V | 101 | For: B-TAG CAA CCT CAA ACA GAC | 55 | 3 |
| RNA | | | | ACC | | |
| (sickle) | | | | (SEQ ID NO:3) | | |
| | | | | Rev: TCA CCA CCA ACT TCA TCC | | |
| | | | | AC | | |
| | | | | (SEQ ID NO:4) | | |
| | | | | Probe: ACG GCA GAC TTC TC | | |
| | | | | (SEQ ID NO:5) | | |
| β-globin | A->T | E7V | 149 | For: B-GCA GGG AGG GCA GGA | 55 | 3 |
| gDNA | | | | (SEQ ID NO:6) | | |
| (sickle) | | | | Rev: GCA GTA ACG GCA GAC TTC | | |
| | | | | TC | | |
| | | | | (SEQ ID NO:7) | | |
| | | | | Probe: ACG GCA GAC TTC TC | | |
| | | | | (SEQ ID NO:8) | | |
| β-globin | T->C | H3H | 101 | For: B-TAG CAA CCT CAA ACA GAC | 55 | 3 |
| RNA | | | | ACC | | |
| | | | | (SEQ ID NO:77) | | |
| | | | | Rev: TCA CCA CCA ACT TCA TCC | | |
| | | | | AC | | |
| | | | | (SEQ ID NO:78) | | |
| | | | | Probe: TCT CCT CAG GAG TCA | | |
| | | | | (SEQ ID NO:79) | | |

B = biotinylated

Pyrosequencing

[0221] Biotinylated single-strand DNA fragments were generated by mixing the PCR product with streptavidin-coated paramagnetic beads (Dynalbeads M280; Dynal, Norway) and processed according to the manufacturer's instructions (Pyrosequencing Sample Preparation; Pyrosequencing AB, Uppsala, Sweden). Throughout the sample preparation steps, the immobilized fragments coupled to the beads were moved using a magnetic tool (PSQ 96 Sample Preparation Tool; Pyrosequencing AB). An automated pyrosequencing instrument, PSQ96 (Pyrosequencing AB), was used to determine cDNA sequence. The reaction was carried out at room temperature. The sequencing protocol utilized stepwise elongation of the primer strand by sequential addition of the deoxynucleoside triphosphates and the simultaneous degradation of the residual unincorporated nucleotides. As the sequencing reaction continued, extension of the CDNA strand by successful nucleotide incorporation results in the release of light and the DNA sequence is determined from the peaks in the pyrogram using Pyrosequencing software (Pyrosequencing AB).

[0222] To examine the linearity of pyrosequencing output, plasmids bearing the normal or sickle β-globin gene were mixed at different concentrations between 0% and 100% normal donor. The mixture of plasmids was then PCR amplified as described above and % sickle mutated β-globin was determined by Pyrosequencing. The percentage of hematopoietic chimerism was determined by the PSQ96 Allele Discrimination Software (Pyrosequencing AB). These plasmids were generated by cloning the β-globin insert amplified from normal donor and sickle cell subject cDNA and confirmed to be identical to published β-globin sequence, into pCR2.1-TOPO (Invitrogen, Carlsbad, Calif.). Similarly, known mixtures of cDNA from PBMC of 2 normal individuals with disparate genotypes at the β-globin loci H3H were also used to demonstrate linearity of the pyrosequencing output.

X and Y Chromosome FISH (BioView Analysis) for Quantitation of Erythroid Precursor Engraftment

[0223] The BioView technique has been described in detail in Shimoni A., et al. (2002) Leukemia 16:1413-1418 and 14-19-1422. Briefly, bone marrow collected in EDTA was diluted 1:1 in PBS and layered on Ficoll/Hypaque to collect mononuclear cells. A cytospun slide was prepared from 300 μl of the final cell suspension containing 30,000 cells. The slides were air-dried, stained with May-Grunwald-Giemsa (MGG), and analyzed by automated bright field scanning microscope (Axioplan2; Carl Zeiss, Jena, Germany) in conjunction with a 3CCD progressive scan camera (DXC9000, Sony, Tokyo, Japan). This system saves the coordinates and images of all cells found on the slides for future reference during the next phases of analysis and classifies the cells according to their morphology after MGG staining. All cell classification assignments were confirmed by a hematopathologist for accuracy. Subsequently, MGG stain was removed using ice-cold methanol/acetic acid (3:1) for 1 hour and washed with PBS. Enzymatic treatment was performed using digestion enzyme solution (Bio-Blue, Bioview) for 7 minutes at 37° C., followed by three 5 minute washes in PBS. Slides were dehydrated in ethanol, dried at 37° C. for 5 minutes, and hybridized with X (X centromeric sequence probe, Spectrum Green, Vysis, Downer's Grove, Ill.) and Y (chromosome Y satellite imi sequence probe; Spectrum Orange, Vysis, Downer's Grove, Ill.) probes. Slides and probe were denatured at 71° C. for 3 minutes and hybridized overnight at 42 C using a HYBrite system (Vysis, Downer's Grove, Ill.). Following hybridization, slides were washed (0.4×SSC at 73° C. for 2 minutes, followed by 2 minutes in 0.01% NP-40/2×SSC) at room temperature and then stained with BioView counterstain (DAPI). Finally, automated fluorescence scanning of the slides was performed and positions and signals saved. Using this approach, the morphologic features of each cell could be directly compared to its XY FISH pattern and donor vs. recipient assignment for erythroid and other lineages could be made.

ABO Immunohistochemistry for Quantitation of Erythroid Precursor Engraftment

[0224] Immunohistochemistry with anti-B-antigen monoclonal antibody (DAKO USA, Carpinteria, Calif.) was performed using bone marrow mononuclear cells that were cytospun onto glass slides as described above. Slides were fixed in cold (−20 C) acetone for 4 minutes and then air-dried. Next, slides were pre-treated with Peroxidase Block (DAKO USA, Carpinteria, Calif.) for 5 minutes to quench endogenous peroxidase activity, followed by a 1:5 dilution of goat serum in 50 Mm Tris-Cl, pH 7.4, for 20 minutes to block non-specific binding sites. Monoclonal anti-human B-antigen antibody was applied at a 1:50 dilution in 50-mM Tris-Cl, pH 7.4 with 3% goat serum for 1 hour. Slides were washed in 50-mM Tris-Cl, 0.05% Tween 20, pH 7.4, and goat anti-mouse horseradish peroxidase-conjugated antibody (BioView, Nes Ziona, Israel) was applied for 30 minutes. After further washing, immunoperoxidase staining was developed using a chromogen kit (BioView) per the manufacturer.

B. Results

Specific Amplification of β-Globin mRNA to Assess Erythroid Lineage Engraftment

[0225] This example describes the development of a method to monitor erythroid lineage-specific engraftment that can be applied to, for example, monitoring the effects of allogenic transplant on nonmalignant hematological diseases and disorders, e.g., sickle cell disease. In nonmalignant hematological diseases and disorders, donor red blood cells will have a normal life span while subject-derived red blood cell production will continue to be ineffective. In addition, subject-derived red blood cells will continue to undergo hemolysis. As a result, the level of engraftment of donor red blood cell precursors is likely to be quite different than the level of functional red blood cell engraftment in peripheral blood. The traditional methods of red blood cell antigen typing or assessment of hemoglobin by electrophoresis can distinguish recipient from donor red blood cells but these methods are limited by the frequent transfusions administered to almost all subjects in the peri-transplant period and the long life span of transfused red blood cells. A schematic outline of the methods of the invention comparing the present RNA-based method to a DNA-based method for measurement of donor engraftment is presented in FIG. 1. Whereas genomic DNA-based methods measure chimerism in all nucleated cells, the RNA-based method of the invention is restricted to the assessment of expressed genes that are unique to specific cell lineages and therefore provides a method for selectively examining lineage-specific chimerism.

[0226] The sickle mutation caused by a single base pair substitution of glutamic acid to valine in the β-globin gene represents an informative polymorphism that distinguishes homozygous recipient DNA from heterozygous donor DNA. Pyrosequencing of PCR-amplified genomic DNA can distinguish homozygous recipient DNA from either heterozygous or alternate allele homozygous donor DNA and provide a quantitative measurement of each allele in the sample. While the β-globin gene is present in all nucleated cells, β-globin RNA is only expressed in erythroid-lineage cells. As shown in FIG. 1, DNA pyrosequencing of a sequence containing the sickle mutation provides a molecular assessment of chimerism of all nucleated cells. In contrast, RNA pyrosequencing of the same mutation provides a specific assessment of erythroid lineage chimerism. As shown in FIG. 2, PCR amplification of genomic DNA with gene-specific primers resulted in the amplification of β-globin DNA from cells derived from different lineages including EBV-transformed B cell lines and PBMC. In contrast, the cDNA primers specifically amplified β-globin only from normal donor PBMC, which contains erythroid precursors. β-globin cDNA was not detected following reverse transcription of RNA from EBV-transformed B cells. The amplified product from PBMC cDNA was confirmed to be β-globin sequence by direct DNA sequencing. Therefore, RNA pyrosequencing is a quantitative sequencing method to detect the presence of single nucleotide polymorphisms (SNPs) within coding regions of β-globin mRNA, and provides a rapid and accurate assessment of reconstitution of erythroid lineage cells after allogeneic transplantation.

Pyrosequencing of β-Globin Gene Polymorphisms/Mutations

[0227] To determine whether pyrosequencing could reliably distinguish between β-globin RNA derived from normal donors, or individuals heterozygous (sickle cell trait) or homozygous (sickle cell disease) for the sickle mutation, RNA-genotyping was determined for 5 normal individuals, 2 individuals with sickle trait, and 3 subjects with sickle cell disease. As shown for representative samples in FIG. 3A, sickle mutation genotyping of β-globin RNA reliably identifies homozygous, heterozygous and normal individuals. Normal individuals are homozygous T/T at nucleotide position 17 of the β-globin gene and are represented by a double-height peak for T (top left panel). Subjects with sickle cell disease have a double height peak for A at the same position (top right panel) and heterozygotes with sickle trait have single height peaks for both A and T (top center panel).

[0228] Using public databases, an additional polymorphism was identified in the β-globin gene (Table 1), at codon 3 (H3H). PCR primers and sequencing probes were designed, optimized, and tested on samples generated from reverse transcription of RNA from 16 normal volunteers of diverse racial backgrounds. As shown in FIG. 3B, pyrosequencing clearly distinguishes individuals who are heterozygous or homozygous at the H3H locus. Since the probe reads the complementary strand sequence G G/A TGCACC, individuals who are homozygous C/C are represented as a 2× height G peak (a G precedes the polymorphic locus) (left panel), heterozygotes are represented by a 1.5× height G peak and 0.5× height A peak (middle panel) and homozygous T/T individuals are represented by peaks of equal height between G and A.

Quantitative Assessment of Mixed Erythroid Lineage Chimerism

[0229] After establishing that pyrosequencing distinguishes recipient from donor-derived RNA, this method was tested to determine whether it could provide a quantitative assessment of erythroid lineage chimerism following allogenic HSCT. Plasmids encoding either normal or sickle β-globin were mixed at varying concentrations and pyrosequencing for the sickle mutation was used to measure the degree of chimerism. Additionally, cDNA derived from PBMC RNA of normal donors, one homozygous (C/C) and another heterozygous (C/T) at the β-globin polymorphism H3H, were mixed at varying concentrations, and similarly analyzed by pyrosequencing. Standard curves generated from analysis of plasmid DNA and normal donor cDNA mixtures are shown in FIGS. 4A and 4B, respectively. Pyrosequencing output was highly linear across all input frequencies for both the sickle mutation and the, β-globin H3H polymorphism (r²<0.968, and r²<0.9487 respectively). FIG. 4B shows that linearity is preserved even when the mixtures were generated from a combination of homozygous and heterozygous disparate donors. This is particularly relevant when monitoring post-transplant chimerism for sickle cell disease, since related donors will often be heterozygous for the sickle mutation.

[0230] Similar results were obtained when samples were processed at different times. Therefore, these experiments demonstrate that the RNA pyrosequencing method is both reliable and quantitative. Consistent with previous experience using gDNA as a template, it was found that pyrosequencing of cDNA accurately measured the presence of as little as 5% donor cells. However, at lower levels of chimerism, the measured level of donor cells was not consistently above background and donor cells were not detected in all replicates.

Assessment of Erythroid Lineage Chimerism Following Non-Myeloablative Allogenic Stem Cell Transplantation in Subject Samples

[0231] To demonstrate the utility of pyrosequencing RNA for the sickle mutation to quantify chimerism of erythroid lineage cells after allogenic HSCT, serial blood and marrow samples 5 subjects (3 with sickle cell disease) who underwent allogenic HSCT after non-myeloablative conditioning was examined. The clinical characteristics of the two subjects are described in Table 2. Results of erythroid lineage chimerism determined by pyrosequencing were compared to results of hematopoietic chimerism determined by 4 other methods: 1) conventional analysis of genomic DNA short tandem repeats (STR); 2) pyrosequencing of genomic DNA for informative β-globin polymorphisms; 3) FISH analysis of bone marrow cells with X and Y chromosome probes; and 4) hemoglobin electrophoresis.

TABLE 2
Clinical Characteristics of Subjects 1 and 2.

| | Subject 1 | Subject 2 |
|---|---|---|
| Subject Age/Sex | 34/F | 52/M |
| Donor sickle genotype/Sex | Sickle trait/M | Sickle trait/M |
| Subject/Donor ABO type | A/O | O/B |
| CD34+ cells/kg infused | 3.5 × 10⁶ | 7.25 × 10⁶ |
| Pre-transplant RBC exchange | 9 | 12 |
| transfusion (# units) | | |
| Post-transplant RBC units | 7 (d 21) | 2 (d 31) |
| transfused (day of last | | |
| transfusion) | | |

Subject 1 and 2 Histories

[0232] Subject 1 is a 34-year-old Nigerian woman with severe sickle cell disease and Subject 2 is 52-year-old man with both severe sickle cell disease and multiple myeloma. Both subjects received G-CSF mobilized peripheral stem cells from HLA-identical sibling donors. The donors for both subjects were male and had sickle trait. Subject 1 was ABO antigen type A, whereas the donor was type O. Subject 2 was ABO antigen type O, whereas his donor was type B. Both subjects underwent red blood cell exchange transfusion within two weeks prior to transplant, resulting in a decrease in hemoglobin S concentration from >75% to less than 35%. Subjects received fludarabine (30 mg/m²/day) and busulfan (Busulfex 0.8 mg/kg/day) for four days, and oral prednisone and FK506 for GVHD prophylaxis. Subject 1 received 3.5×10⁶ CD34+ cells/kg and Subject 2 received 7.25×10⁶ CD34+ cells/kg. Neither subject experienced treatment-related toxicities or GVHD following non-myeloablative conditioning and both subjects reported significant improvement in their sickle cell disease-related symptoms following transplantation. Subject 1 received 7 units of packed red blood cells (PRBC) and Subject 2 received 2 units of pRBC in the first month post transplant and did not receive any further transfusions.

Measurement of Hematopoietic Engraftment by Assessment of Genomic DNA

[0233] Hematopoietic engraftment was monitored by analysis of gDNA derived from PBMC and BM using pyrosequencing for β-globin polymorphisms. All subjects developed mixed gDNA chimerism, ranging from 18-50%, between days 60-180, with no differences between PBMC and BM levels. As shown in FIG. 5B, donor engraftment of Subject 1, measured by gDNA pyrosequencing, increased from 16% on day 10 to 25-30% from day 20 and onward. Subject 2 demonstrated a higher level of donor engraftment post transplant. By day 33, Subject 2 achieved 45% donor engraftment in PBMC, which was maintained in subsequent samples. Results of gDNA β-globin pyrosequencing were also compared to conventional STR-analysis. As summarized in Tables 2 and 3, both DNA-based methods revealed similar levels of donor chimerism. For Subject 1, both cytogenetic and Bioview FISH evaluation of PBMC and marrow for the presence of nucleated cells with the Y chromosome also revealed comparable levels of donor engraftment.

TABLE 3
Comparison of Hematopoietic Chimerism
Using Different Methods

| % Donor Post Transplant | | |
|---|---|---|
| Pre | 1 month | 3 months |

Subject 1

| | | | | |
|---|---|---|---|---|
| DNA | | | | |
| DNA pyrosequencing | 0 | 25 | 26 | |
| STR analysis | 0 | 24 | 27 | |
| XY cytogenetics | | | 25 | |
| XY FISH (Bioview) | | | 25 | |
| Cells: erythroid progenitors | 0 | — | 23 | |
| β-globin RNA | 0 | 69 | 66 | |
| | | | | Donor |
| % Hemoglobin S | 78 | 21 | 29.8 | 37 |

Subject 2

| | | | | |
|---|---|---|---|---|
| DNA | | | | |
| DNA pyrosequencing | 0 | 45 | 47 | |
| STR analysis | | 42 | 40 | |
| Cells: erythroid progenitors | 0 | 18 | 49 | |
| β-globin RNA | 0 | 97 | 100 | |
| | | | | Donor |
| % Hemoglobin S | 96.6 | 30.8 | 29 | 35.2 |

Measurement of Donor Engraftment by Cellular Analysis of Hematopoietic Precursor Cells

[0234] To directly measure the contribution of sex-mismatched donor cells to erythroid, granulocyte and lymphoid lineages in the reconstituted host, Bioview analysis was employed in Subject 1. In this method, FISH with X and Y-chromosome probes is performed in conjunction with morphologic analysis of stained bone marrow smears. For Subject 1, donor derived cells were found to constitute 25% of marrow erythroid precursors at 3 months post-transplant. Using the same technique, 25% of myeloid and lymphoid cells in the same marrow samples were also donor-derived. This method could not be utilized for Subject 2, who had received an allogenic transplant from a donor of the same sex. To directly quantify the number of donor erythroid precursors in this subject, erythroid cells were quantified through manual counting of MGG stained marrow cytopsin preparations and then compared to immunocytochemistry results for B antigen (donor-specific). While genomic chimerism of whole bone marrow derived mononuclear cells was approximately 40-50% one month after transplant, only 18% of erythroid lineage precursors were donor-derived post-transplant. By 3 months after transplant, 49% of erythroid precursor cells were donor-derived. Using genomic methods to assess PBMC chimerism, 47% of cells were donor-derived at this time. As summarized in Table 3, analysis of erythroid lineage chimerism using direct identification of donor erythroid precursors with either a Y chromosome probe or B antigen-specific antibody demonstrated levels of engraftment that were either similar to or less than that obtained with genomic chimerism analysis using either STR-based methods or gDNA pyrosequencing of the β-globin gene.

Measurement of Erythroid Lineage Chimerism by Hemoglobin Electrophoresis

[0235] To measure the contribution of donor cells to RBC in peripheral blood levels of hemoglobin S and A were monitored by hemoglobin electrophoresis. FIG. 5 and Table 3 summarize the results of hemoglobin electrophoresis during the first 3 months following transplantation for Subjects 1 and 2. Both subjects demonstrated a decrease in percent hemoglobin-S (Hgb S) from >78% to less than 35% following RBC exchange transfusion before transplant. The stem cell donors for both subjects had sickle trait, with 35-37% Hgb S and 62% Hgb A. In the early post-transplant period, Subject 1 received a total of 7 units pRBCs, and demonstrated a nadir of 22% Hgb S by day 80. By day 90, the level of Hgb S had risen to 30%. This remained lower than the level of Hgb S in her sickle trait donor, reflecting the continued contribution of transfused normal RBC. Subject 2 demonstrated a similar profile. His level of Hgb S was only 29% following transfusion of 2 units pRBC on day 31 and remained at this level (below the donor's level of 35% Hgb S) at day 90. Since both subjects received multiple RBC transfusions in the peri-transplant period, these studies confirmed that the results of hemoglobin electrophoresis did not accurately reflect the level of donor engraftment during this entire period.

Measurement of Erythroid Lineage Engraftment by β-Globin RNA Pyrosequencing

[0236] In both subjects, donor β-globin RNA was not detectable by pyrosequencing prior to transplant. As shown in FIG. 6, the level of donor β-globin RNA in Subject 1 rose to 48% by day 15, and fther increased to 69% by day 45 post transplant. This level of donor RNA expression was much higher than the level of donor DNA in marrow or peripheral blood or the number of erythroid precursor cells in marrow enumerated by FISH. By one month after transplant, Subject 2 had achieved 76% donor-derived β-globin RNA even though assessment of DNA only revealed 45% donor chimerism and analysis of marrow erythroid precursor cells only demonstrated 18% donor engraftment. At 2 months after transplant, DNA chimerism remained unchanged but donor-derived β-globin RNA expression had increased to 100% and remained at that high level. RNA pyrosequencing was performed on both marrow and peripheral blood samples of Subject 2, and yielded identical results.

[0237] Chimerism in a child with SCD (Subject 3) who underwent NMA allo-HSCT with an HLA-matched sibling donor with sickle trait was also measured. SCD subjects were compared to two subjects (Subjects 4 and 5) who underwent non-myeloablative allo-HSCT following fludarabine and busulfex conditioning for CLL and Hodgkin's disease, respectively. As shown in FIG. 6, all 3 SCD subjects engrafted with donor cells and had relatively stable levels of donor DNA chimerism between 30 and 100 days post transplant. During this period, Subject I had 20-30% donor DNA and Subjects 2 and 3 had 40-50% donor DNA. In all 3 SCD subjects, the level of donor β-globin RNA in peripheral blood measured by pyrosequencing was approximately 2 fold greater than the level of DNA chimerism. In contrast, the same analysis in subjects with hematologic malignancies showed equivalent levels of donor β-globin RNA and donor DNA chimerism. These experiments demonstrate that engraftment of relatively small numbers of normal donor hematopoietic stem cells in subjects with SCD can result in substantially higher levels of donor erythropoiesis in vivo. Since all three SCD subjects also had marked clinical improvement, these results suggest that as little as 25% donor engraftment can result in significant resolution of sickle cell disease symptoms.

β-Globin RNA Pyrosequencing Demonstrates Ineffective Host Erythropoiesis.

[0238] While the increased representation of donor erythropoiesis in peripheral blood likely reflects the rapid hemolysis of recipient RBC compared to RBC derived from normal donor precursor cells, analysis of β-globin RNA and gDNA in bone marrow cells also showed the same level of disparity. As shown in FIG. 7, Subject 1 demonstrated 55% donor β-globin RNA in marrow and 66% donor β-globin RNA in peripheral blood at the same time that donor marrow gDNA chimerism was only 25%. Similarly, Subjects 2 and 3 demonstrated 100% donor-derived β-globin RNA in marrow and peripheral blood, even though donor erythroid precursor cell engraftment was only 50%. This disparity between RNA and DNA chimerism was not seen in control subjects with hematologic malignancies (Subjects 4 and 5). This direct comparison of host and donor erythropoiesis in mixed chimeric marrow demonstrates a higher degree of ineffective host erythropoiesis than previously anticipated, and suggests that this mechanism of anemia is a more significant component of the pathophysiology of sickle cell anemia than previously appreciated. The presence of ineffective erythropoiesis in SCD explains the maturation advantage of AA or SA donor erythroid precursor cells over SS cells that allows for greater donor contribution to overall erythropoiesis following SCT. These findings support the notion that non-myeloablative HSCT can be curative for SCD in the setting of stable mixed hematopoietic chimerism.

Demonstration of Ineffective Erythropoiesis in Sickle Cell Disease.

[0239] Functional donor chimerism was also determined in purified marrow populations of immature (pro-and basophilic—glycophorin [GYPA+, CD71+hi]) versus mature (polychromatophilic, orthochromatophilic erythroblasts [GYPA+, CD71+dim]) cells to determine the stage of maturation at which SS erythroblasts are lost. While non-sickle cell disease subjects demonstrated similar rates of donor and host erythropoiesis, all sickle cell disease subjects (n=3) demonstrated progressive intramedullary loss of SS erythroblasts with maturation, with enrichment of donor erythroid precursor chimerism appearing from the earliest stages of hemoglobinization. The presence of ineffective erythropoiesis in sickle cell disease explains the maturation advantage of AA or SA donor erythroid precursor cells over SS cells that allows for greater donor contribution to overall erythropoiesis following SCT. This is the first definitive in vivo demonstration of ineffective erythropoiesis in sickle cell disease, and supports the notion that NMA-SCT can be curative for sickle cell disease in the setting of stable donor engraftment.

### Example 2

### Identification of Additional Allel-Specific Polymorphisms to Detect Lineage-Specific Cells

[0240] Additional polymorphisms specific to RBC lineage genes for measurement of RBC chimerism are useful for post-allograft erythroid-lineage specific chimerism and allow the monitoring of any subject-donor pair, regardless of the underlying disease. Some diseases in which knowledge of the extent of donor RBC engraftment would aid in the evaluation of the transplant procedure include MDS, aplastic anemia and thalassemia. Development of a RBC SNP panel for measurement of RBC chimerism also readily allows the evaluation of various clinical factors, such as ABO incompatibility, and the composition and intensity of the conditioning regimen, on RBC engraftment.

[0241] Based on public databases, such as Hembase, available through the National Institute of Diabetes and Digestive and Kidney Diseases (NIDDK), 13 constitutively expressed RBC lineage-specific genes have been identified, including genes associated with hemoglobin, the RBC cytoskeleton genes, and those which encode the RBC blood group antigens. Known SNPs present in the coding regions of these genes (i.e. exon or 3′UTR) were identified through publicly available databases, such as those available through GenBank. 3-58 candidate known exon or 3′UTR SNPs per gene (246 total SNPs) were found, as shown on Table 4.

TABLE 4
Analysis of allele frequency of RBC expressed SNPs.

| | Column number | | | | | | | |
|---|---|---|---|---|---|---|---|---|
| | (1) | | (3) | | | (6) | (7) | (8) |
| | # | | # SNPs | (4) | (5) | # SNPs | # SNPs | # SNPs |
| | candidate | | with >0.15 | # | # | with >0.15 | with >0.25 | with >0.35 |
| | SNPs in | (2) | frequency | informative | informative | frequency | frequency | frequency |
| | 3′UTR | # SNPS | in at least | SNPs in | SNPs in | for both | for both | for both |
| Gene name | or exon | tested | 1 population | Caucasians | Nigerians | races | races | races |
| Kell Blood group antigen | 37 | 25 | 10 | 0 | 10 | 0 | 0 | 0 |
| Lutheran blood group antigen | 8 | 4 | 4 | 4 | 1 | 1 | 1 | 1 |
| Glycophorin A | 18 | 16 | 14 | 7 | 9 | 1 | 1 | 3 |
| Glycophorin B | 58 | 34 | 2 | 2 | 2 | 0 | 0 | 2 |
| Glycophorin C | 11 | 11 | 9 | 9 | 9 | 2 | 2 | 5 |
| Rhesus blood group CcEe Ag | 18 | 9 | 6 | 4 | 5 | 0 | 0 | 1 |
| Rhesus blood group B | 8 | 8 | 5 | 5 | 4 | 1 | 2 | 1 |
| Solute carrier family 4, | 36 | 27 | 6 | 4 | 6 | 0 | 3 | 1 |
| Diego blood group | | | | | | | | |
| Solute carrier family, | 25 | 15 | 13 | 7 | 12 | 2 | 1 | 3 |
| Kidd blood group | | | | | | | | |
| Alpha globin 1 | 11 | 6 | 5 | 2 | 3 | 1 | 1 | 0 |
| Alpha globin 2 | 10 | 3 | 1 | 1 | 0 | 0 | 0 | 0 |
| Beta globin | 3 | 1 | 0 | 0 | 0 | 0 | 0 | 0 |
| Erythrocyte membrane | 3 | 3 | 2 | 0 | 2 | 0 | 0 | 0 |
| protein band 4.2 | | | | | | | | |

[0242] In order to develop a panel of expressed RBC SNPs that can be used for consistently identifying informative loci to distinguish between any subject-donor transplant pair, expressed RBC SNPs occurring at a high allele frequency across diverse populations were identified. The allele frequencies of candidate expressed RBC SNPs were determined, in a high-throughput fashion, in a reference panel of non-subject European- and African-derived de-identified, family-based samples. These samples comprise 96 independent European chromosomes and 124 independent Nigerian chromosomes. Genotyping of these samples to determine allele frequency within these populations was performed by Sequenom MassArray. This system is based on primer extension of multiplex PCR products with detection by matrix assisted laser desorption ionization-time of flight (MALDI-TOF) mass spectrometry, and is scalable due to considerable automation and software provided with the system. Enhancement of this system allows processing of 48×384-well plates per day, with a seven-plex reaction resulting in more than 120,000 genotypes per day; the automatic tracking of the large number of primer pools used each day; and automation of the addition of primer and probe directly to PCR plates.

[0243] PCR assays were designed for 165 candidate erythroid SNPs, representing 1-34 SNPs per erythroid-specific gene (column 2, Table 4), of which 77% were successfully genotyped. Assays were considered successful and genotype data were included in the analyses if they passed all of the following criteria: (1) >85% of all genotyping calls were obtained, (2) markers did not deviate from Hardy-Weinberg equilibrium, and (3) markers had no more than one Mendelian error. Informative expressed SNPs were defined as occurring at >0.15 population frequency. As shown in Table 5, 12 of the 13 genes were found to encode SNPs with >0.15 allele frequency in either the Caucasian or the Nigerian population (columns 4 and 5 of Table 4). Of the 165 SNPs, 76 occurred with greater than 0.15 frequency in at least one population (column 3 Table 4); 33 and 7 had at least 0.15 allele frequency in only the Nigerian and Caucasian populations, respectively. As shown in columns 6-8 (Table 4), 36, 28 and 17 expressed SNPs were found to occur in both Caucasian and Nigerian populations at a minimum population frequency of 0.15, 0.25 and 0.35, respectively.

TABLE 5

| Probability of at least | | | |
|---|---|---|---|
| one informative SNP | p > 0.15 | p > 0.25 | p > 0.35 |
| In a panel of 8 SNPs | 0.728 | 0.900 | 0.968 |
| In a panel of 12 SNPs | 0.858 | 0.968 | 0.994 |
| In a panel of 17 SNPs | 0.937 | 0.992 | 0.999 |

[0244] The criteria for inclusion of a SNP in the final expressed SNP chimerism panel is as follows: 1) amplicons from cDNA encoding the SNP of interest are readily PCR amplifiable. For each SNP, SNP-specific oligonucleotide primers that can amplify cDNA (rather than gDNA) are designed. The conditions of PCR amplification are optimized. In addition, SNP-specific sequencing primers, suitable for our pyrosequencing assay are designed and tested; 2) these SNPs are confirmed to occur at high allele frequency when amplified from cDNA derived from PBMC of at least 10-12 normal donors; 3) since quantitation of chimerism depends on calculation of area under the curve, allele-specific mRNA expression are not strongly biased toward particular gene alleles. This is readily determined by RNA pyrosequencing of a heterozygote, in which the observed pyrosequencing output should be similar to the predicted pattern and not biased; 4) confirmation that quantitative measures of allele-specific mRNA expression can be performed is determined by generation of a standard curve, following mixing of known amounts of RNA from 2 genotypically different individuals (as described above).

### Example 3

### Development of SNP-Based Assays to Monitor Engraftment of Distinct Hematopoietic Cell Types (Myeloid, T cell, B cell, NK Cell, Dendritic Cell) Following Allogeneic HSCT

[0245] To develop novel regimens that prevent delayed graft rejection in subjects with hemoglobinopathies treated with NMSCT, a better understanding of donor-host interactions leading to anti-donor sensitization and immune reconstitution following NMA allo-HSCT is required. Detailed kinetic characterization of host cell recovery and donor cell engraftment in blood and marrow following NMA allo-HSCT in man has been limited. Nevertheless, there have been several reports of preliminary associations between transplant outcome and extent of T cell and/or APC chimerism (Chan, G. W., et al. (2003) Biol Blood Marrow Transplant 9:170; Peggs, K. S., et al. (2004) Blood 103:1548; Koenecke, C., et al. (2003) Exp Hematol 31:911; Keil, F., et al. (2003) Transplantation 76:230; Dey, B. R., et al. (2003) Biol Blood Marrow Transplant 9:320). Most studies have focused on assessment of reconstitution of a limited number of immune cell lineages because: (1) isolation of multiple purified cell subpopulations is labor-intensive; and (2) cell material needed to perform the necessary manipulations to achieve multiple cell subset isolation is limiting, especially at the early time points following transplant. Since transplant outcome results from complex interactions between multiple donor and host cell populations, simultaneous analysis of multi-lineage subpopulations will required to comprehensively characterize hematopoietic chimerism and immune reconstitution. Although RNA pyrosequencing was originally developed to examine erythroid lineage chimerism, this method can be readily adapted to define chimerism of any cell subset, without requiring laborious cell isolation, provided that an informative expressed SNP on a gene that defines the cell subset of interest is utilized.

[0246] In order to assess post-transplant immune reconstitution, expressed SNP panels for B cells, T cells, natural killer (NK) cells, monocytes and dendritic cells (DCs) are developed. The source of cell subset specific SNPs is derived from known cell surface phenotypic markers that define these individual subsets. In order to expand the pool of candidate cell subset-specific genes, expression microarray datasets that were merged and normalized with publicly available data sets (both generated from the Affymetrix U95A platform (Chaussabel, D., et al. (2003) Blood 102:672; Chun, T. W., et al. (2003) Proc Natl Acad Sci USA 100:1908; Klein, U., et al. (2003) Proc Natl Acad Sci USA 100:2639), were analyzed. These datasets include microarray analysis of RNA expression in normal B, T, NK, macrophage and blood-derived dendritic cells. As shown in FIG. 7, in which genes in the merged dataset were clustered on the basis of RNA expression levels (darkest gray-high expression levels; lightest gray=low expression levels), each hematopoietic cell subset can be distinguished on the basis of expression of a defined set of genes.

[0247] Based on this microarray data as well as from known phenotypic markers that have been confirmed to be cell lineage specific based on literature review, a list of lineage specific genes has been compiled from which the expressed SNP panels are generated (Table 6). As shown in Table 6, 1 to 132 known expressed SNPs per gene (present in the exon or 3′UTR) have been identified through analysis of the publicly available dbSNP database (columns 2 and 3, Table 6).

TABLE 6

Column number

| | | | | (4) |
|---|---|---|---|---|
| | | | | # of |
| | | (2) | (3) | validated |
| | | # of | # of | or multiply |
| Cell | (1) | 3′UTR | exon | submitted |
| subset | Gene | SNPs | SNPs | SNPs |
| T cells | CD3E | 9 | 6 | 4 |
| | CD3D | 14 | 3 | 4 |
| | CD3Z | 19 | 4 | 18 |
| | CD3G | 11 | 2 | 5 |
| | TCRA | 19 | 0 | 7 |
| | LNK | 5 | 7 | 10 |
| | CD28 | 13 | 3 | 7 |
| B cells | CD19 | 6 | 1 | 2 |
| | CD20 | 11 | 2 | 5 |
| | CD22 | 17 | 6 | 10 |
| | CD79A | 9 | 1 | 3 |
| | CD79B | 32 | 15 | 19 |
| | B cell linker | 10 | 3 | 2 |
| Monocytes | CD14 | 23 | 7 | 18 |
| NK cells | CD56 | 18 | 5 | 13 |
| | CD94 | 26 | 5 | 26 |
| | CD16 | 91 | 41 | 52 |
| | CD160 | 9 | 2 | 5 |
| DCs | DC-IGN | 36 | 8 | 31 |
| | DC-AMP | 30 | 7 | 28 |
| | BDCA2 | 24 | 1 | 7 |
| | CD83 | 36 | 8 | 31 |

[0248] High density SNP microarrays (>10,000 SNP) are commercially 30 available, e.g., through Affymetrix. Many of the SNPs present on the commercially available arrays are non-expressed, but a subset are of interest are included in the present assay. Moreover, approximately 140 individuals of diverse racial backgrounds have been genotyped with these microarrays, and the data is publicly available. Therefore, the SNP candidates, tabulated in Table 6, first undergo cross-referencing with publicly available information to determine if population frequency data is already available. If not, then, allele frequency is determined by Sequenom MassArray as described above.

[0249] High allele frequency SNPs are identified (>0.15 frequency in both Caucasian and African populations), and the specificity and sensitivity of individual SNP candidates is important criteria to confirm a cell lineage specific expressed SNP-based assay. Therefore, for each SNP, mixing studies are performed between total PBMC RNA of 2 normal donors who are genotypically disparate at the SNP loci of interest. The series of RNA mixes are reverse transcribed into cDNA, PCR-amplified in a lineage-specific manner, and submitted for pyrosequencing. Pyrosequencing output is compared with known cell-subset specific chimerism, calculated based on prior immunophenotypic characterization of the PBMC. For example, to test a candidate B cell lineage-specific expressed SNP, (a) the number of B cells in PBMC derived from 2 independent normal leukopack donors who are genotypically disparate for the candidate SNP is calculated. This is performed by immunophenotyping PBMC with a CD20+ monoclonal antibody; (b) generate total RNA from these two sources of PBMC; and (c) perform mixing studies of the two total RNA samples. In order for the candidate SNP to be suitable for inclusion in the expressed SNP panel, the pyrosequencing outputs correlate well with the calculated number of lineage-specific cells within the inputted mixture, and consistently detect at least 5% donor cells. These studies are repeated with at least 5 donors per SNP to confirm reproducibility.

[0250] As shown in Table 6, while genes that are predominantly specific for a cell lineage subset have been selected, many have some degree of expression in other cell subsets as well (i.e., CD3 predominantly on T cells, but to a lesser degree on NK cells). The mixing studies delineate the extent that RNA pyrosequencing can sensitively and specifically reflect lineage-specific chimerism, and prioritize SNPs whose expression most closely matches chimerism based on cell number.

[0251] Since expression of some leukocyte genes may be up- or down-regulated in relation to cell activation state, similar mixing studies are performed wherein PBMC of one of 2 normal leukopack donors is activated (ie., addition of PMA and ionomycin for T cell activation; LPS for DC activation). Thus, the extent to which activation influences quantitation of chimerism is determined based on a specific lineage-associated SNP.

### Example 4

### Development of SNP-Based Methods to Monitor Engraftment of Functional Molecules Following Allogeneic HSCT

[0252] Example 3 describes the use of markers that are predominantly present on the cell surface to define a cell subset. However, various leukocyte populations can also be defined based on their functional activity, which is more biologically relevant to understanding transplant immunology. In response to activation or stimulation, a cell population may express activation markers, and secrete cytokines or chemokines, and signaling pathways are stimulated. A hallmark of T cell activation is secretion of cytokines that may be involved in proliferation (IL2, IL7, IL15), inflammation (IL1β, IL6, TNFα), tolerance induction (IL10, TGFβ, IL4) or cytolytic activity (granzyme B, perforin, IFNγ and granulysin expression). Likewise, DC activation is associated with the secretion of IL12; in peripheral blood, the primary source of IFNα secretion is from plasmacytoid dendritic cells (PD) (Ronnblom, L. and Alm, G. V. (2001) J Exp Med 194:F59). There is an association between cytokine secretion and transplant outcome. For example, GVHD has been associated with dysregulated proinflammatory cytokine expression (Ferrara, J. L., et al. (1996) Stem Cells 14:473). Additionally, murine studies indicate that the relative balance between secretion of TH1 and TH2 cytokines appears to contribute to determining the extent of GVHD (Krenger, W. and Ferrara, J. L. (1996) Immunol Res 15:50). Studies have also explored the functional activity of regulatory T cells (CD4+, CD25+) in engraftment and GVHD (Clark, F. J., et al. (2004) Blood 103:2410), and have implicated IL-10 in playing an important role in tolerance induction. Accordingly, expressed SNPs of functional molecules are used to determine whether effector activity of activated immune cell populations are host or donor derived. The use of expressed SNPs derived from functional molecules to measure chimerism will identify critical cell populations contributing to transplant outcome. For example, detection of primarily donor-derived proinflammatory and cytolytic cytokines indicates the initiation of GVHD. Conversely, detection of primarily host-derived immune cell activation indicates of incipient graft rejection. These studies are particularly useful for the analysis of immune reconstitution following NMA allo-HSCT, since coexisting donor and host derived hematopoiesis is frequently observed. Moreover, as alternative sources of allogeneic hematopoietic stem cells are increasingly used, these analyses provide information on the activity of specific cellular components derived from the stem cell source that may subsequently influence engraftment and the risk for toxicities (Rainsford, E. and Reen, D. J. (2002) Br J Haematol 116:702; Bofill, M., et al. (1994) J Immunol 152:5613).

[0253] Table 7 lists examples of cytokines and secreted factors that are associated with specific cell subsets and includes markers associated with general T cell activation, T/NK cell cytolytic activity, Th1 and Th2 activity, DC activation and tolerance induction. The number of known SNPs, recorded in the dbSNP database, expressed in the 3′UTR (column 2) and exons (column 3) of these genes are tabulated, as well as the number that have been identified by multiple sequencing efforts (column 4). Other functional molecules which contain allele specific variants useful in the methods of the invention include the chemokines and their receptors, and molecules associated with activation-induced signaling. As described above in Examples 2 and 3, a panel of SNPs is developed for each specific cell subset.

TABLE 7

| | Column number | | | |
|---|---|---|---|---|
| | | | | (4) |
| | | | | # of |
| | | (2) | (3) | validated |
| | | # of | # of | or multiply |
| | (1) | 3′UTR | exon | submitted |
| Cell subset | Gene | SNPs | SNPs | SNPs |
| Activated | IL2 | 9 | 3 | 4 |
| T cells | CD69 | 27 | 6 | 22 |
| | IL7 | 12 | — | 10 |
| | IL15 | 28 | 5 | 20 |
| Proinflammatory | IL1β | 30 | 7 | 22 |
| cytokines/ | TNFα | 56 | 9 | 25 |
| chemokines | IL6 | 24 | 6 | 21 |
| | IL8 | 15 | 11 | 16 |
| NK/T cell | Perforin | 9 | 5 | 6 |
| cytolytic | Granzyme B | 11 | 5 | 6 |
| activity | Granulysin | 17 | 4 | 11 |
| | IFNγ | 31 | 7 | 26 |
| T_{H}1 | IFNγ | 31 | 7 | 26 |
| | TNFα | 56 | 9 | 25 |
| | TNFβ | 90 | 10 | 47 |
| | GMCSF | 25 | 6 | 21 |
| T_{H}2 | IL4 | 12 | 3 | 11 |
| | IL10 | 19 | 10 | 14 |
| | IL13 | 43 | 6 | 33 |
| DC activation | IL12 | 13 | 8 | 16 |
| | IFNα (pDC) | 21 | 5 | 16 |
| Tolerance | IL10 | 19 | 10 | 14 |
| induction | TGFβ | 4 | 1 | 5 |

[0254] Validation of these SNPs is also performed as described above, and in addition, a variation of the mixing studies (also as described above) is used to confirm that the high allele frequency SNPs derived from functional molecules sensitively and specifically measure chimerism of the appropriate population. For example, to examine SNPs from the cytolytic panel, the well-defined model system of influenza A stimulation of HLA-A2+ cytotoxic T lymphocytes is utilized. Two previously influenza-vaccinated normal leukopack donors, one HLA-A2-positive and the other HLA-A2-negative, who are genotypically disparate for one of the candidate SNP is identified. PBMC from the two donors are stimulated overnight with the HLA-A2+ defined cognate peptide of the influenza matrix protein (M1: GILVATAAL), which will activate M1-specific cytotoxic T cells in the HLA-A2+, but not the A2-negative donor. The percent of perforin/granzyme B/IFNγ expressing cells per leukopack donor is quantified using conventional methods of intracellular cytokine staining of the functional molecule of interest. Following M1 peptide stimulation and flow cytometric analysis, RNA is extracted from PBMC of both donors, mixed in known quantities, reverse transcribed, PCRd and pyrosequenced. Pyrosequencing output is compared with the expected number of cells expressing the functional molecule of interest in the input mixture, as calculated from the known percent of positive-expressing cells detected by flow cytometry. Candidate SNPs are acceptable if they detect up to 5% donors cells.

### Example 5

### Development of a Panel of SNPs for High-Throughput Quantitative Monitoring of Lineage-Specific Engraftment Following Allogeneic HSCT

[0255] Utilizing the lineage-specific allelic variants identified and validated as described above, it is necessary to confirm that the assembled expressed SNP panels reproducibly yield informative SNP loci for each cell lineage when actual HLA-matched subject-donor pairs are examined. Furthermore, these confirmed sets of SNP panels are utilized to prospectively monitor the kinetics of multi-lineage donor engraftment in subjects enrolled in the clinical trials. The development of this high throughput tool provides the ability to assess lineage-specific engraftment in real-time. Development of these SNP-based chimerism panels is useful not only to investigate the impact of a novel conditioning regimen and hematopoietic stem cell source on post-transplant engraftment in hemoglobinopathy subjects, but these panels also have broad applicability for the monitoring of multi-lineage engraftment of any stem cell transplant population. These SNP-based chimerism panels also provide insight regarding the association of specific donor or host cell sub-populations on transplant outcome. These SNP panels are highly amenable to conversion to an oligonucleotide microarray format, which further facilitates high-throughput analysis, including automated analysis. In this format, one sample of total RNA from subject PBMC is sufficient for comprehensive analysis of chimerism across multiple cell lineages.

[0256] To confirm that the assembled expressed SNP panels reliably identify informative SNPs for each cell lineage in HLA-matched subject-donor pairs, high throughput genotyping is performed. This is first performed by pyrosequencing analysis of gDNA and then subsequently of cDNA. A lineage specific SNP panel is considered satisfactory if at least 1 informative SNP per cell lineage is identified for each subject-donor pair. For example, if it is assumed that each lineage panel comprises 12 SNPs, then cDNA from 8 subjects can be genotyped per lineage in a 96 well format. If less than 1 informative SNP per cell lineage is identified per subject-donor pair, then additional candidate SNPs are evaluated and added to the panel, as described above.

[0257] If SNP typing of gDNA is satisfactory, SNP frequency in cDNA samples is assessed. Following reverse transcription of gDNA into cDNA from matched related subject donor pairs, including subjects of Afro-American descent, SNP frequency is assessed in these transplant pairs by pyrosequencing. A lineage specific SNP panel is satisfactory if at least 1 informative SNP per cell lineage is identified for each subject-donor pair.

[0258] Once the completed and validated lineage-specific expressed SNP panels are created, they are utilized to prospectively monitor lineage-specific engraftment for subjects. The SNP-based multi-lineage chimerism analysis requires a three-stage process: (1) genotyping of each subject and donor pair (utilizing gDNA derived from donor and pre-transplant subject PBMC) to identify the informative SNP loci per each cell lineage/functional molecule-specific SNP panel; (2) PCR amplification of cDNA (generated from reverse transcription of total RNA) using the identified cell lineage-specific primers to generate the amplicon from which the informative SNP will be assayed. 2-4 informative SNPs are used to track engraftment of each lineage; (3) pyrosequencing using SNP-specific sequencing probes to directly quantify chimerism.

[0259] For these analyses, total RNA is extracted from PBMC prospectively collected at 2, 4, and 6 weeks, and at 3, 6, 9 and 12 months following transplant to determine the kinetics of reconstitution. Data generated from the SNP-based chimerism studies is analyzed in conjunction with immunophenotyping and T cell reconstitution studies, as well as with overall gDNA chimerism measured by conventional STR analysis. These data provide a description of the rate of cellular reconstitution following NM SCT.

[0260] A critical question regarding the efficacy of NMA-HSCT as a curative therapy for treatment of hemoglobinopathies is whether end-organ damage can be prevented or even improved. Since mixed hematopoietic chimerism is a frequent consequence of NMA-HSCT, an unanswered question is how much donor chimerism is sufficient for functional end-organ improvement. Improvement in end-organ damage can result from either prevention of ongoing damage from the sequelae of sickling and hemolysis, or alternatively, from regeneration of damaged tissue by donor derived non-hematopoietic cells, presumably arising from donor mesenchymal or multi-potent hematopoietic stem cells.

[0261] Subjects having sickle cell disease experience chronic intravascular hemolysis on endothelial function and end-organ injury. Also, pulmonary hypertension is a common end-organ complication of SCD, with an incidence of 20-40% in the adult population, and is associated with a 2-year mortality of 50% (Castro, O., et al. (2003) Blood 101: 1257; Gladwin, M. T., et al. (2004) N Engl J Med 350:886). Serum biomarkers of intravascular hemolysis have been identified that are strongly correlated with endothelial damage and pulmonary hypertension. These include VCAM-1, increased NO consumption and increased cell free hemoglobin (Reiter, C. D., et al. (2002) Nat Med 8:1383). Accordingly, it is determined whether mixed chimerism following NMA-HSCT is associated with improvement in multiple parameters of chronic intravascular hemolysis.

[0262] The transplantation of bone marrow can result in the generation of adipocytes, cardiomyocytes, hepatocytes, osteoblasts, renal mesangial cells, endothelial cells and chondrocytes, with donor engraftment ranging from 3-26% depending on the tissue type and model system (Asahara, T., et al. (1997) Science 275:964; Ito, T., et al. (2001) J Am Soc Nephrol 12:2625; Imasawa, T., et al. (2001) J Am Soc Nephrol 12:1401; Grant, M. B., et al. (2002) Nat Med 8:607; Grigoriadis, A. E., et al. (1988) J Cell Biol 106:2139; Lagasse, E., et al. (2000) Nat Med 6:1229; Makino, S., et al. (1999) J Clin Invest 103:697; Murohara, T. (2001) Trends Cardiovasc Med 11:303; Peichev, M., et al. (2000) Blood 95:952; Pittenger, M. F., et al. (1999) Science 284:143; Schatteman, G. C. and Awad, O. (2004) Anat Rec 276A: 13). The mechanism by which this occurs has been controversial, and various studies have supported one or more of the following hypotheses: (1) the existence of a pluripotent stem cell that is capable of maturing into different cell lineages; (2) the presence of transdifferentiation, in which bone marrow cells are genetically reprogrammed when exposed to a different microenvironment; (3) cell fusion occurs (Ying, Q. L., et al. (2002) Nature 416:545; Terada, N., et al. (2002) Nature 416:542), in which bone marrow cells mature cells fuse with cells of diverse tissue phenotypes; and (4) Bone marrow cells are a source of specific stem cells present in different tissue (Grove, J. E., et al. (2004) Stem Cells 22:487). Regardless of the underlying mechanism by which donor-derived marrow cells arrive in non-hematopoietic tissue, a consistent finding in these studies has been that donor cells appear to be attracted to sites of injury and tissue ischemia, perhaps due to increased rates of cellular incorporation or by specific injury-induced homing of progenitors (Ortiz, L. A., et al. (2003) Proc Natl Acad Sci USA 100:8407). In adult subjects with hemoglobinopathy, endothelial and end-organ injury are commonly observed, and thus allogeneic HSCT may result in significant incorporation of donor-derived cell in non-hematopoietic organs. Therefore, if post-transplant end-organ functional improvement is observed, it is necessary to determine whether functional improvement can be attributed simply to the benefits of donor erythropoiesis alone, or to actual normal donor cell contribution to non-hematopoietic tissue. Thus far, the only available methods for monitoring the fates of marrow-derived donor cells into non-hematopoietic tissue (primarily in model systems) have been by labeling donor cells with green fluorescent protein, or identifying donor Y chromosome in female recipients. These assays are not cell-lineage specific, and the use of secondary criteria is required, such as morphology or co-localization with specific markers to establish cell identity. The RNA-based expressed SNP approach described herein is utilized to examine non-hematopoietic lineage chimerism by choosing the appropriate cell-lineage specific SNP, and thus advance the ability to evaluate the impact of a stem cell therapy.

[0263] Accordingly, SNP based assays for measurement of, for example, endothelial, stromal and osteoblast lineage donor engraftment are described herein. Progenitor cells have been transplanted for the treatment of non-hematologic illness, such as osteogenesis imperfecta and myocardial injury syndromes (Assmus, B., et al. (2002) Circulation 106:3009; Strauer, B. E., et al. (2002) Circulation 106:1913; Horwitz, E. M., et al. (1999) Nat Med 5:309) and neurological and cognitive diseases and disorders, such as Alzheimer's disease and Parkinson's disease. Tracking donor engraftment in relevant non-hematopoietic tissue provides a method to quantify the impact of therapy.

[0264] Since endothelial cells are central to SCD pathogenesis, an expressed SNP-based assay to monitor endothelial lineage specific chimerism has been developed. Through literature review and extensive analysis of public databases, a series of endothelial cell specific genes (shown on Table 8) has been identified, and using the same experimental approaches as described above, a series of potentially informative SNP candidates have been identified. As seen in Table 8, of the 84 SNP candidates derived from 3 endothelial cell-specific genes (column 1), 62 were assayed (column 2), and 14 were found to occur at high allele frequency in both Caucasians and Africans (columns 6-8). Other endothelial cell specific genes from which potentially informative expressed SNPs are identified include VE-Cadherin, VEGFR1, VEGFR2, and tie-2, an endothelial-specific tyrosine kinase. SNPs are validated using the methods described above. Specifically, pyrosequencing output of mixes of total RNA extracted from PBMC of normal donors who are genotypically disparate for the SNPs of interest, are compared with known cell chimerism calculated from prior immunophenotyping with anti-CD146 antibody, which detects circulating endothelial cells.

TABLE 8
Analysis of allele frequency of expressed SNPs of endothelial cell origin.

| | | | Number | | | |
|---|---|---|---|---|---|---|
| | | | of SNPs | | | |
| | Number of | | detected to | Number | Number | Number |
| | candidate | | be frequently | of SNPs | of SNPs | of SNPs |
| | SNPs in | Number | polymorphic | informative | informative | informative |
| | 3′UTR or | of SNPS | in at least | in Caucasian | in Nigerian | for both |
| Gene name | exon | tested | 1 population | population | population | races |
| Vascular cell adhesion molecule 1 isoform a | 28 | 14 | 6 | 2 | 6 | 2 |
| (V CAM1) | | | | | | |
| Nitric oxide synthase 3 (NOS3) | 32 | 30 | 5 | 4 | 3 | 2 |
| Von willebrandt factor precursor (V WF) | 24 | 18 | 17 | 13 | 12 | 8 |
| Heme oxygenase 1 (HMOX1) | 27 | 21 | 12 | 10 | 10 | 8 |
| Heme oxygenase 2 (HMOX2) | 6 | 6 | 5 | 5 | 5 | 5 |

[0265] SNP based chimerism assays specific for stromal cells (i.e., candidate genes include fibronectin, vimentin, smooth-muscle actin, N-cadherin) and osteoblasts (i.e., candidate genes include type 1 procollagen, alkaline phosphatase, osteocalcin) are also similarly developed. Panels of expressed endothelial, stromal and osteoblast SNPs are assembled, and their reliability for identifying informative SNP between any HLA-matched subject-donor pairs is tested on paired samples of gDNA, and then cDNA samples, as described above.

[0266] Post-transplant endothelial, stromal cell and osteoblast chimerism is monitored by tracking donor chimerism by RNA pyrosequencing. Since bone marrow aspirate contains cells of endothelial, stromal and osteoblast lineages in addition to hematopoietic lineage, total RNA is extracted from post transplant marrow aspirates samples and used as starting material for the SNP-based chimerism assays. Marrow aspirates is collected at 1, 3, 6, and 12 months after transplant.

TABLE 9

| | | | |
|---|---|---|---|
| | GeneBank | | |
| | Accession | | SEQ ID |
| Gene | No. | SNP Sequence | NO. |

Kell Blood Group
Antigen

| | | | |
|---|---|---|---|
| * | rs8176039 | CCTTCAATGACTCCCTCACATTCTT | 204 |
| | | [A/G]GAGAATGCTGCAGACGTTGGGG | |
| | | GGC | |
| * | rs4252393 | TTGCATCTAAGGGTATAATGCAGAA | 205 |
| | | [C/G]AAAGAGGCACCCTGTAACTCA | |
| | | CCCC | |
| * | rs4252391 | TGGAGAGGCTCCAGCTTTATCTCTT | 206 |
| | | [G/T]CTGGGTTCAAATCTGGGTATGG | |
| | | TAG | |
| * | rs4252388 | GGGGACCTCAGAGGAGCCACTCATC | 207 |
| | | [A/G]GCCTGTCCTTTCTGTTCTTCCCC | |
| | | CT | |
| * | rs4252381 | CTCTGAGAAAGTGAGCTTCCAGCCC | 208 |
| | | [G/T]AACTTGGACCCTCTGCAGAGGG | |
| | | GCA | |
| * | rs4252372 | GACATGGGGGGTTTTCTACCTAAGG | 209 |
| | | [C/T]AGAAGGGCCCGGGAGCCAACTC | |
| | | CAG | |
| * | rs4252365 | CAGGTACCAGAGCCTGCTCGGCGAC | 210 |
| | | [C/T]CTCCAGGAAGCTGGCCGGTCAC | |
| | | GGT | |
| * | rs4252357 | AGTCACCTTTTATCCTCAGGGGATA | 211 |
| | | [C/T]ATTCCAAGACGCCCCAGTGGAT | |
| | | GCC | |
| * | rs6943031 | CTGCAGGTAGGTGGAAAAAAAGAC | 212 |
| | | A[A/G]GAGCCATACAGAGAAAACAC | |
| | | CCTCT | |
| * | rs8176049 | GTTGGAGACGAGAAGGGCTTGGATT | 213 |
| | | [A/C]AGTATCGGAAAGCTGCTCCCA | |
| | | ATTG | |
| Alpha Globin 1 | | | |
| # | rs2858016 | CCGGGGGCATGAAGCTCAGTTTGGT | 214 |
| | | [A/G]AGCACCACCTGGCAGGTGTAC | |
| | | CAAA | |
| * | rs3888374 | GGGCGGCGTTAAGGGCCCGGGGCTG | 215 |
| | | [A/G]CTCGGAGCAGGTTAGGGAACA | |
| | | GCGC | |
| * | rs4505325 | GCCTCCGCATCCTCCTCTCCTCCCC | 216 |
| | | [C/T]CAGGACTACCCTTAACCCACTC | |
| | | AGG | |
| * | rs4510012 | CCCATGCGCTCCCCAAGCCCAAGGT | 217 |
| | | [A/G]ACCCTGTGCAGGAGGCAAAGGT | |
| | | GGT | |
| # | rs2685118 | TCCTTCAGCTGTAATCAGCAGACAC | 218 |
| | | [A/G]GGGGACAGGATGGCCAGGGGC | |
| | | ACAG | |
| Alpha Globin 2 | | | |
| % | rs2685121 | GCCTGTGTGTGCCTGGGTTCTCTCT | 219 |
| | | [A/G]TCCCGGAATGTGCCAACAATGG | |
| | | AGG | |
| Heme Oxygenase | | | |
| 1 | | | |
| # | rs1807714 | GAACTCCTGACCTCGTGATCCACCT | 220 |
| | | [A/G]CCTCGGCCTCCCAAAGTGCTGG | |
| | | GAT | |
| # | rs2018898 | CGGAGGTTGCAGTGAGCTGAAATTA | 221 |
| | | [C/T]GCCACTGCACTCCAGCCTGGGT | |
| | | GAT | |
| # | rs4645726 | GTTAGGGTGCGAGAACCCGGGTCGG | 222 |
| | | [C/G]GACGCGGGTGAGCCGCGCGGT | |
| | | AATC | |
| # | rs4239877 | GGGAAGCGAATACTCCACAGGGCA | 223 |
| | | C[A/G]GTCTCCCAATGCAAAATGGG | |
| | | CACCT | |
| % | rs743813 | AGTTCCAGTGTGGCCGCTCACACGC | 224 |
| | | [C/G]TCTACCAGCCTGCTAGAGTCCT | |
| | | GGA | |
| # | rs743815 | ATAAATAAATGAATGAGCGAAGTG | 225 |
| | | A[C/T]GTGAATCCTAACTGCCATCTT | |
| | | CACC | |
| # | rs4645742 | GTGAAAGGACTTAGGGAAGTTTTCC | 226 |
| | | [G/T]GGGGGCTGAAGTTTGAGGGGA | |
| | | CCTT | |
| % | rs737777 | ACTGCGAGGCTGGGGAACAGCCTGT | 227 |
| | | [G/T]CGTTGGTCAGTGGTCCCCAAAT | |
| | | ATG | |
| * | rs4645743 | CTGCGAGGCTGGGGAACAGCCTGTG | 228 |
| | | [C/T]GTTGGTCAGTGGTCCCCAAATA | |
| | | TGT | |
| * | rs4645746 | TTTCCAAGAGAAGTTAAAGGCTCTG | 229 |
| | | [C/T]GGAGTCCTTCAGTGACAGAACT | |
| | | GGT | |
| # | rs713618 | CAGCATTCGTAGCCTGAAGGTGGGT | 230 |
| | | [C/T]GGAGGGCAGTGGCTGCTGCAT | |
| | | GGTG | |
| # | rs713873 | GCCAGACCTGAGTGCTAGCTGTGTG | 231 |
| | | [A/G]CCTTGAGTGAGGCACTTGACCT | |
| | | TTC | |
| VCAM1 | | | |
| * | rs3783608 | TTTCTATTTCACTCCGCGGTATCTG | 232 |
| | | [C/T]ATCGGGCCTCACTGGCTTCAGG | |
| | | AGC | |
| * | rs3783609 | TACCCTCCCAGGCACACACAGGTGG | 233 |
| | | [A/G]ACACAAATAAGGGTTTTGGAA | |
| | | CCAC | |
| * | rs3783613 | AGAGATCCAGAAATCGAGATGAGT | 234 |
| | | G[C/G]TGGCCTCGTGAATGGGAGCTC | |
| | | TGTC | |
| # | rs3176878 | TTCCAGGAAGAGAAAACAACAAAG | 235 |
| | | A[C/T]TATTTTTCTCCTGAGCTTCTCG | |
| | | TGC | |
| * | rs3176879 | CATATAGTCTTGTAGAAGCACAGAA | 236 |
| | | [A/G]TCAAAAGTGTAGCTAATGCTTG | |
| | | ATA | |
| # | rs3181092 | ATTATAAACTGCCTCCTTTAGTCAC | 237 |
| | | [A/G]TTGTAGCTCTTTCTGAAGTGCTA | |
| | | AG | |
| Erythrocyte mem- | | | |
| brane protein | | | |
| band 4.2 | | | |
| * | rs1474199 | GATATAAGTAAGACCTGAGTTTTGT | 238 |
| | | [A/G]TTAGCATGTAGGTTAAAGCATG | |
| | | TGG | |
| * | rs495286 | AAAAAAAAAAAAAAAAAAAAAGGC | 239 |
| | | G[A/G]GGCCTATTATTATACTTTTAC | |
| | | CACG | |
| Glycophorin A | | | |
| * | rs4524333 | TGTAACTCTTTGTGACTGAAGAAGA | 240 |
| | | [A/G]GTTGAAGTGTGCATTGCCACCT | |
| | | CAG | |
| # | rs4449373 | ACTTAATGCTGATATGCTCACAATT | 241 |
| | | [G/T]CTGTATAAAATAGAAGTTGAGA | |
| | | AAG | |
| % | rs1132787 | ATAGTTAAATTTGGTATTCGTGGGG | 242 |
| | | [C/T]AAGAAATGACCATTTCCCTTGT | |
| | | ATT | |
| # | rs6537251 | TAATGGGCTTTACATTTTAAACATA | 243 |
| | | [A/G]CTTGAAATAACAAATCATGACT | |
| | | ATA | |
| * | rs4643761 | TGGGTAGTTTATAAAGGAAATAGGT | 244 |
| | | [G/T]TAATTGACTTACTGTTCCCCAT | |
| | | GGC | |
| # | rs6537252 | ATGCTCTAGAAGCTAACACTCACAC | 245 |
| | | [A/T]GGCAGTCTTGGTGTTTTCCAGGT | |
| | | AG | |
| * | rs6537253 | AAACTGGTCTATGACATAATCACTT | 246 |
| | | [C/T]GGTGGACTCTATTCTAGACACA | |
| | | GTG | |
| # | rs6844670 | GGGTCAGAGAATGTGGCAACTTATA | 247 |
| | | [A/G]GTTCTATATCTTTTGCTCAGAT | |
| | | GGT | |
| * | rs4557214 | ATCTTGTGAGAACTCACTCACTATT | 248 |
| | | [A/G]TGAGAACAGCATGAGCAGCATG | |
| | | AGG | |
| * | rs4130880 | GCTGGAGGGTTTAGAAACTTTGAGT | 249 |
| | | [A/G]GCAAGATGGAAGAAAAGGAAT | |
| | | AAAT | |
| * | rs4535287 | TTCCTGGCCTGGCTGTGATACCTAT | 250 |
| | | [A/G]CACAAGTATTTTACACCATTCTT | |
| | | AC | |
| % | rs4350961 | GTTGTGTCTTTTGCAGACAAGTAAT | 251 |
| | | [A/G]TAGTATCTTGCAGGTAAACTTA | |
| | | TAA | |
| * | rs4613516 | GCATTTGTGCGCTTCCTCCTTATGG | 252 |
| | | [A/T]TTAACCTTGGTTTAGTTTCTATG | |
| | | CA | |
| # | rs4469024 | CCTCATTTAGATCTTTTGCTCATAA | 253 |
| | | [C/T]GACACAAGCAAACAACCAGGGC | |
| | | TGA | |
| Glycophorin B | | | |
| # | rs1511423 | GGTTTTATAAAAGTAACTTTATTTT | 254 |
| | | [C/T]AGCTTGTCTGTAGATTCAATTTT | |
| | | CT | |
| # | rs1511427 | CTTGTACAGACTAGAGGGTCACATT | 255 |
| | | [A/G]TGTAAAGCCTAACATAGCCCTG | |
| | | CAA | |
| Glycophorin C | | | |
| # | rs6568 | AGCTCAGAACGATTGGAAATAAATT | 256 |
| | | [G/T]GAAATGTAACCGAGCATTCCG | |
| | | AGTC | |
| # | rs935024 | GGCCAGGACAGTTCATTTCTGGCTC | 257 |
| | | [C/T]TGTGGGGGCCAGTTCCCAGAGA | |
| | | GCA | |
| # | rs3791345 | GACATTTCACCCTTCCTTTTGTTTC | 258 |
| | | [G/T]TGCAGCTGGTGCCCCTGTAGGGA | |
| | | AA | |
| # | rs1530149 | CCAAAGATCTCCCTGGGAGGATTAC | 259 |
| | | [A/G]GGGAATGTGAGCTCAGTGGGG | |
| | | GGTC | |
| # | rs6431172 | GATGACATGGAAGCTGCAGAGCTGG | 260 |
| | | [G/T]TTGTCCCAGGTGGCCTAGCTCA | |
| | | GAT | |
| # | rs6431173 | CCAGGTGGCCTAGCTCAGATGCCAC | 261 |
| | | [A/G]AGGAGGGAACTGTTGCAGGCT | |
| | | AACT | |
| # | rs6431174 | CCAGATGGCCACACCAGAGAGCAG | 262 |
| | | G[A/G]CAACTTAAAGAGATAATGCA | |
| | | CACAC | |
| # | rs1000857 | CAAATACAAAAAAAAAGCCACCTTT | 263 |
| | | [A/T]ATTTTTCAAGTAGCTGAAATTA | |
| | | TTA | |
| # | rs1000858 | TTCCTCTGGGCTTACTGAGATTCCC | 264 |
| | | [C/T]AAGTCAGAGTGAGGCCACTCCT | |
| | | TTC | |
| Rhesus Blood | | | |
| Group B | | | |
| # | rs2245623 | ACGCTGCAGGAAGACCATGAGGAA | 265 |
| | | G[C/T]CAAAGCCCACGAAGACCATG | |
| | | GCATG | |
| # | rs3748569 | TTGTACCCCAGCGTGGAGACAGTCC | 266 |
| | | [A/G]AGCCAAGAAGCCAGCTGCCAG | |
| | | AGCC | |
| # | rs4661163 | TTGCCACTTATGTCCCTGTCCTGAG | 267 |
| | | [A/T]CTGAGGAGCGGGGAATAGCAA | |
| | | GGGC | |
| % | rs6427311 | GATAGTTCCAAGCTCTATCACCTCC | 268 |
| | | [A/G]TGAAGCCTCCCATAGCCCAGGC | |
| | | AAT | |
| # | rs4661165 | GAGAAAAAAAGTCCTGAAAACAAA | 269 |
| | | A[A/C]CCCGACAACAACCTTAAAGT | |
| | | AGGAG | |
| von Willebrandt | | | |
| Factor Precursor | | | |
| # | rs216902 | GCCGAGTGGAGCTGCCTGTGCACAC | 270 |
| | | [A/G]CCTGGACAGAGAGAAGCAGAG | |
| | | GATG | |
| % | rs216310 | GTGCCTCGCTGAAGGGGTACTCCAC | 271 |
| | | [A/G]GTCACCATGTAGGAGTACTGCA | |
| | | GCA | |
| % | rs216311 | CGACCGCCCTGAAGCCTCCCGCATC | 272 |
| | | [A/G]CCCTGCTCCTGATGGCCAGCCA | |
| | | GGA | |
| % | rs216321 | GTCTGTGCAGTTCCACTTCCGGTCC | 273 |
| | | [C/T]GACAGACACTAGGAGCAGTCAT | |
| | | GGC | |
| # | rs1063857 | AGTGTACCAAAACGTGCCAGAACTA | 274 |
| | | [C/T]GACCTGGAGTGCATGAGCATG | |
| | | GGCT | |
| # | rs1800378 | GTTCCAGGTGACCTCCGCATCCAGC | 275 |
| | | [C/T]TACAGTGACGGCCTCCGTGCGC | |
| | | CTC | |
| * | rs1800376 | GGGAGTGCCTTGTCACAGGTCAATC | 276 |
| | | [G/T]CACTTCAAGAGCTTTGACAACA | |
| | | GAT | |
| * | rs1800375 | TCTCTCCAGGGGAGTGCCTTGTCAC | 277 |
| | | [A/T]GGTCAATCACACTTCAAGAGCT | |
| | | TTG | |
| # | rs2362481 | ACATTTATCTCCCCAAGTAGGCTCT | 278 |
| | | [C/G]AGATCCAGTTCAGCACCCAGGA | |
| | | CAA | |
| # | rs6489676 | GAACTGGCAA[A/C]TGGATAAACAA | 279 |
| | | AATGTAGCCTATCC | |
| # | rs6489677 | GGATAAACAAAATGTAGCCTATCCA | 280 |
| | | [C/T]CCAAGGAAATAGATTTCAGCTA | |
| | | TAA | |
| * | rs6489679 | CTGCTGCAAGAATGGCTATAACTAA | 281 |
| | | [A/G]AAGTCAAAAATTTTACTAGATG | |
| | | TCG | |
| % | rs6416321 | CCCTTGGGGGTCCCCAATCCCGAAG | 282 |
| | | [A/G]GTGGGAGTTCGGATGCCGCCTC | |
| | | CTT | |
| * | rs6489681 | ACCTGCTTCGAGTGTAAAAATTCAG | 283 |
| | | [C/T]CGGATTATCTCATGAACTGTCTG | |
| | | GC | |
| # | rs6416322 | GAGGCAGGAGGAGGGGTCCATTTTA | 284 |
| | | [C/T]AAGAGCTCTCCCATGAGACGCT | |
| | | AGG | |
| # | rs6489682 | TCCCCAGAGGGGAAGAGGAGTGCC | 285 |
| | | A[G/T]CTCCCCGGGACAGTTCACGGA | |
| | | CCTG | |
| % | rs1990326 | GGCAAAGACATCACTCTTCCCCAGA | 286 |
| | | [A/G]GTTGGCAGTATCTCACACTGAC | |
| | | ACT | |
| Nitric Oxide | | | |
| Synthase 3 | | | |
| % | rs1799983 | CCCTGCTGCTGCAGGCCCCAGATGA | 287 |
| | | [A/C]CCCCCAGAACTCTTCCTTCTGCC | |
| | | CC | |
| * | rs3918211 | GCCACATGTTTGTCTGCGGCGATGT | 288 |
| | | [C/T]ACCATGGCAACCAACGTCCTGC | |
| | | AGA | |
| % | rs3800787 | CAGAGCTGGAACATAACATGAAGC | 289 |
| | | A[C/G]GTCAAAAGTCATGCCCTCCTC | |
| | | CCGC | |
| # | rs1835428 | GCACAAGCAGCGCGGCGAAGAGTG | 290 |
| | | C[A/G]CCCGCGAAGAAAACGAGCTG | |
| | | GCGGG | |
| # | rs6464119 | TGGGAGAATCTCTCCTTCCCATTTC | 291 |
| | | [C/T]AGTGCACCCACCAACTCTGGAA | |
| | | CAG | |
| Rhesus Blood | | | |
| Group CcEe Ag | | | |
| * | rs3093621 | TTCACCTTGAGGGACCCTAGAAAAA | 292 |
| | | [C/T]AGAAAACCCATTTAATGGTCCA | |
| | | GGT | |
| * | rs3093629 | TCCAGGTGTTTAGGCCAAAAGCCCT | 293 |
| | | [A/G]GATGGTGAAGGCCTGTCAAAGA | |
| | | TGA | |
| * | rs3093639 | TGAAGCCTTAAGGACAACTGTAGAC | 294 |
| | | [A/G]TTCCCTCACCGAAACCCTAGAC | |
| | | CAG | |
| % | rs3093653 | TATGCCCCCAGTAAATATTTGTTAA | 295 |
| | | [A/G]TGAACTAAGGGAGCTATCATTT | |
| | | ACT | |
| # | rs1053438 | ATGCACAGTCACTCCACATCCACCA | 296 |
| | | [C/T]TGAAGGAAAGGAAAAAAGGGC | |
| | | AGAG | |
| # | rs9689 | GCCATGGTCATCTGACAGTCTCTAC | 297 |
| | | [A/G]CTGTGAATATTGCCTGGTGATC | |
| | | AAG | |
| Lutheran Blood | | | |
| Group Antigen | | | |
| # | rs7026 | GAGCTATTTTTACCTCCCGCCTCCC | 298 |
| | | [A/G]TGCTGGTCCCCCCACCTGACGT | |
| | | CTT | |
| # | rs8113311 | GAGTCCCTGGGGAAAGCGGGGAGC | 299 |
| | | T[G/T]GGAGGAATCCAGAGAAAAGG | |
| | | GGGCC | |
| # | rs1871045 | CCCAGGCAGAAGAGCTCATGGGCCA | 300 |
| | | [C/T]GTTAAGGCGCTCAGATCCCATG | |
| | | GTT | |
| % | rs4803759 | ATGTTGCCCAGGCTCGTCTTGAACT | 301 |
| | | [C/T]GAGCTCAAAATGATCTGCTTGC | |
| | | CTT | |
| Heme Oxygenase | | | |
| 2 | | | |
| # | rs1051308 | TCAGCCCCAGCTTATCTCCTCCTCC | 302 |
| | | [A/G]CGCTGTGTAAATGCTCCAGCAC | |
| | | TCA | |
| # | rs7702 | GCCTGTCAGCCTCAGCCCAGTCTGT | 303 |
| | | [C/G]TTGCTTAAGGGTGCGCCTCCCC | |
| | | AGG | |
| # | rs8129 | AGACCAACAACACACAAGCTCATTG | 304 |
| | | [C/T]CAGCCCCCTGCCACCCACTGAC | |
| | | CCT | |
| # | rs7665 | GGGAGCGGGAAAGTGACCACTGAG | 305 |
| | | C[A/G]CAGGGAGCAAAGCACAGGGG | |
| | | GCCAG | |
| # | rs4786509 | GTGTAATAAAAACTACAAGAATAAT | 306 |
| | | [C/G]TTTCAATCACACGATCAGAAGC | |
| | | AAA | |
| Solute carrier | | | |
| family 4, Diego | | | |
| blood group | | | |
| * | rs3819179 | GCAGTGGCTGATAAAGATTTGCCCA | 307 |
| | | [C/T]CTCCACGACAAGGGAGAGTGC | |
| | | TTCT | |
| * | rs2298720 | ATACCTTTAAGCTGGTTGGCAAGTT | 308 |
| | | [A/G]TTTCATGTCACCGGTGACATAG | |
| | | CCA | |
| # | rs2298718 | GTATGACCAGTTTGGCTGGAAAGAA | 309 |
| | | [A/G]GGATTGTAATGTCCTGTGGCTG | |
| | | AAA | |
| # | rs1058396 | ACTCAGTCTTTCAGCCCCATTTGAG | 310 |
| | | [A/G]ACATCTACTTTGGACTCTGGGG | |
| | | TTT | |
| # | rs3087560 | AGATCCCTGTTCTGAAGATCGACTC | 311 |
| | | [C/T]GGTCCATTTTAGAGGCCTCTGGT | |
| | | TC | |
| * | rs515596 | CCAAGTGTAAGAAAGGAATAAGGA | 312 |
| | | T[C/T]CTAGCACGTGCAACATAAGCG | |
| | | ATAC | |
| # | rs7359740 | ACAGGTGTCAAGGGTGAGCTCTGTG | 313 |
| | | [A/G]CGGAAATGGCACTGGGGTATT | |
| | | ATGG | |
| # | rs1944336 | GTCTCTCATATCCATGAACGTCTCT | 314 |
| | | [G/T]CATCACCACTGAAGTCCAAGCC | |
| | | ACC | |
| # | rs8090267 | CACCTCCTTGATAGCCCCCATTCAT | 315 |
| | | [C/T]CATTTATTGAATGACTGTTTACT | |
| | | AC | |
| % | rs534637 | GGACTAGAGGGGGAAGAACTGAAA | 316 |
| | | C[C/T]CAGAGAAAAGTTGGCACAGT | |
| | | GCCAG | |
| * | rs900969 | TGGAGACTTTGTAAACCACTAAGAA | 317 |
| | | [A/G]CCTGGGCTGGGGAACTGTCTA | |
| | | GCCC | |
| * | rs553917 | TCTGATAAATTCCCCTGGTTGTGAA | 318 |
| | | [A/G]CATTGTAGCGCATTCATAACAG | |
| | | CTG | |
| * | rs6507643 | CTCTGTTTGGGGTCTCTGACTTCCC | 319 |
| | | [A/G]CAACACTAAAGGTACTACAGAT | |
| | | GAT | |
| # | rs4793084 | AACCTGAATTAGCATGTTAGCAAGC | 320 |
| | | [G/T]CAGTCCCCTGACCATGTGATGT | |
| | | GAT | |
| # | rs4793085 | TCAATGATGGGGGCATGCATAGCTA | 321 |
| | | [A/C]AGAATATAGGGGTGAGGCCGG | |
| | | GTGC | |
| # | rs2079008 | AATGGTTGCTGTGGAGGGGGAAGA | 322 |
| | | A[A/C]ATAGGAGTAGGGAATGAAGA | |
| | | CAAAA | |
| # | rs7209801 | CCTCAAAGGCCCAGGGTCATGTGAT | 323 |
| | | [A/G]CCATTAAGTTGATCCAATAGCT | |
| | | TCC | |
| * | rs8066822 | AGGAGACGCTGTGCCTGTGTGGCCA | 324 |
| | | [C/T]GTGCCCTCTCTGGGCCTCTGTTT | |
| | | TC | |
| * | rs5036 | CACCACATCACACCCGGGTACCCAC | 325 |
| | | [A/G]AGGTGAGGACCCCAGCCTCCT | |
| | | CCGT | |

* = Allele Frequency >0.15 in Nigerian
# = Allele Frequency >0.15 in Nigerian and Caucasian
% = Allele Frequency >0.15 in Caucasian

Equivalents

[0267] Those skilled in the art will recognize, or be able to ascertain using no more than routine experimentation, many equivalents to the specific embodiments of the invention described herein. Such equivalents are intended to be encompassed by the following claims.

The application's sequence listing, which the Patent Office published only in electronic form, follows.

SEQUENCE LISTING (381 sequences)

SEQ ID NO: 1 - DNA, 626 bp, Homo sapiens
acatttgcttctgacacaactgtgttcactagcaacctcaaacagacaccatggtgcatctgactcctgaggagaagtctgccgttactgccctgtggggcaaggtgaacgtggatgaagttggtggtgaggccctgggcaggctgctggtggtctacccttggacccagaggttctttgagtcctttggggatctgtccactcctgatgctgttatgggcaaccctaaggtgaaggctcatggcaagaaagtgctcggtgcctttagtgatggcctggctcacctggacaacctcaagggcacctttgccacactgagtgagctgcactgtgacaagctgcacgtggatcctgagaacttcaggctcctgggcaacgtgctggtctgtgtgctggcccatcactttggcaaagaattcaccccaccagtgcaggctgcctatcagaaagtggtggctggtgtggctaatgccctggcccacaagtatcactaagctcgctttcttgctgtccaatttctattaaaggttcctttgttccctaagtccaactactaaactgggggatattatgaagggccttgagcatctggattctgcctaataaaaaacatttattttcattgc

SEQ ID NO: 2 - protein, 147 aa, Homo sapiens
MVHLTPEEKSAVTALWGKVNVDEVGGEALGRLLVVYPWTQRFFESFGDLSTPDAVMGNPKVKAHGKKVLGAFSDGLAHLDNLKGTFATLSELHCDKLHVDPENFRLLGNVLVCVLAHHFGKEFTPPVQAAYQKVVAGVANALAHKYH

SEQ ID NO: 3 - DNA, 21 bp, Homo sapiens
tagcaacctcaaacagacacc

SEQ ID NO: 4 - DNA, 20 bp, Homo sapiens
tcaccaccaacttcatccac

SEQ ID NO: 5 - DNA, 14 bp, Homo sapiens
acggcagacttctc

SEQ ID NO: 6 - DNA, 15 bp, Homo sapiens
gcagggagggcagga

SEQ ID NO: 7 - DNA, 18 bp, Homo sapiens
gcagtaacggcagacttc

SEQ ID NO: 8 - DNA, 14 bp, Homo sapiens
acggcagacttctc

SEQ ID NO: 9 - DNA, 1915 bp, Homo sapiens
agcgatttcatcttcaggcctggactacaccactcaccctcccagtgtgcttgagaaacaaactgcacccactgaactccgcagctagcatccaaatcagcccttgagatttgaggccttggagactcagatcctgaacaagagagaacaaaatctctactttgatggaacttccattctgtggggaagagactgacaataagcaattaaataaataagaactcagcagtaggccttgcctcagatccaaggtcactcggaagaggccatgtctaccctcaatgacactcatggaggaaatgctgagagaagcattcagatgcatgacacaaggtaagactgccaaaaatcttgttcttgctctcctcattttgttatttgttttatttttaggagttttgagagcaaaatgacaacacccagaaattcagtaaatgggactttcccggcagagccaatgaaaggccctattgctatgcaatctggtccaaaaccactcttcaggaggatgtcttcactggtgggccccacgcaaagcttcttcatgagggaatctaagactttgggggctgtccagattatgaatgggctcttccacattgccctggggggtcttctgatgatcccagcagggatctatgcacccatctgtgtgactgtgtggtaccctctctggggaggcattatgtatattatttccggatcactcctggcagcaacggagaaaaactccaggaagtgtttggtcaaaggaaaaatgataatgaattcattgagcctctttgctgccatttctggaatgattctttcaatcatggacatacttaatattaaaatttcccattttttaaaaatggagagtctgaattttattagagctcacacaccatatattaacatatacaactgtgaaccagctaatccctctgagaaaaactccccatctacccaatactgttacagcatacaatctctgttcttgggcattttgtcagtgatgctgatctttgccttcttccaggaacttgtaatagctggcatcgttgagaatgaatggaaaagaacgtgctccagacccaaatctaacatagttctcctgtcagcagaagaaaaaaaagaacagactattgaaataaaagaagaagtggttgggctaactgaaacatcttcccaaccaaagaatgaagaagacattgaaattattccaatccaagaagaggaagaagaagaaacagagacgaactttccagaacctccccaagatcaggaatcctcaccaatagaaaatgacagctctccttaagtgatttcttctgttttctgtttccttttttaaacattagtgttcatagcttccaagagacatgctgactttcatttcttgaggtactctgcacatacgcaccacatctctatctggcctttgcatggagtgaccatagctccttctctcttacattgaatgtagagaatgtagccattgtagcagcttgtgttgtcacgcttcttcttttgagcaactttcttacactgaagaaaggcagaatgagtgcttcagaatgtgatttcctactaacctgttccttggataggctttttagtatagtatttttttttgtcattttctccatcaacaaccagggagactgcacctgatggaaaagatatatgactgcttcatgacattcctaaactatcttttttttattccacatctacgtttttggtggagtcccttttgcatcattgttttaaggatgataaaaaaaaataacaactagggacaatacagaacccattccatttatctttctacagggctgacattgtggcacattcttagagttaccacaccccatgagggaagctctaaatagccaacacccatctgttttttgtaaaaacagcatagctt

SEQ ID NO: 10 - protein, 297 aa, Homo sapiens
MTTPRNSVNGTFPAEPMKGPIAMQSGPKPLFRRMSSLVGPTQSFFMRESKTLGAVQIMNGLFHIALGGLLMIPAGIYAPICVTVWYPLWGGIMYIISGSLLAATEKNSRKCLVKGKMIMNSLSLFAAISGMILSIMDILNIKISHFLKMESLNFIRAHTPYINIYNCEPANPSEKNSPSTQYCYSIQSLFLGILSVMLIFAFFQELVIAGIVENEWKRTCSRPKSNIVLLSAEEKKEQTIEIKEEVVGLTETSSQPKNEEDIEIIPIQEEEEEETETNFPEPPQDQESSPIENDSSP

SEQ ID NO: 11 - DNA, 1827 bp, Homo sapiens
agcgatttcatcttcaggcctggactacaccactcaccctcccagtgtgcttgagaaacaaactgcacccactgaactccgcagctagcatccaaatcagcccttgagatttgaggccttggagactcagaactcagcagtaggccttgcctcagatccaaggtcactcggaagaggccatgtctaccctcaatgacactcatggaggaaatgctgagagaagcattcagatgcatgacacaaggtaagactgccaaaaatcttgttcttgctctcctcattttgttatttgttttatttttaggagttttgagagcaaaatgacaacacccagaaattcagtaaatgggactttcccggcagagccaatgaaaggccctattgctatgcaatctggtccaaaaccactcttcaggaggatgtcttcactggtgggccccacgcaaagcttcttcatgagggaatctaagactttgggggctgtccagattatgaatgggctcttccacattgccctggggggtcttctgatgatcccagcagggatctatgcacccatctgtgtgactgtgtggtaccctctctggggaggcattatgtatattatttccggatcactcctggcagcaacggagaaaaactccaggaagtgtttggtcaaaggaaaaatgataatgaattcattgagcctctttgctgccatttctggaatgattctttcaatcatggacatacttaatattaaaatttcccattttttaaaaatggagagtctgaattttattagagctcacacaccatatattaacatatacaactgtgaaccagctaatccctctgagaaaaactccccatctacccaatactgttacagcatacaatctctgttcttgggcattttgtcagtgatgctgatctttgccttcttccaggaacttgtaatagctggcatcgttgagaatgaatggaaaagaacgtgctccagacccaaatctaacatagttctcctgtcagcagaagaaaaaaaagaacagactattgaaataaaagaagaagtggttgggctaactgaaacatcttcccaaccaaagaatgaagaagacattgaaattattccaatccaagaagaggaagaagaagaaacagagacgaactttccagaacctccccaagatcaggaatcctcaccaatagaaaatgacagctctccttaagtgatttcttctgttttctgtttccttttttaaacattagtgttcatagcttccaagagacatgctgactttcatttcttgaggtactctgcacatacgcaccacatctctatctggcctttgcatggagtgaccatagctccttctctcttacattgaatgtagagaatgtagccattgtagcagcttgtgttgtcacgcttcttcttttgagcaactttcttacactgaagaaaggcagaatgagtgcttcagaatgtgatttcctactaacctgttccttggataggctttttagtatagtatttttttttgtcattttctccatcaacaaccagggagactgcacctgatggaaaagatatatgactgcttcatgacattcctaaactatcttttttttattccacatctacgtttttggtggagtcccttttgcatcattgttttaaggatgataaaaaaaaaataacaactagggacaatacagaacccattccatttatctttctacagggctgacattgtggcacattcttagagttaccacaccccatgagggaagctctaaatagccaacacccatctgttttttgtaaaaacagcatagctt

SEQ ID NO: 12 - protein, 297 aa, Homo sapiens; identical to SEQ ID NO: 10

SEQ ID NO: 13 - DNA, 1653 bp, Homo sapiens
agcgatttcatcttcaggcctggactacaccactcaccctcccagtgtgcttgagaaacaaactgcacccactgaactccgcagctagcatccaaatcagcccttgagatttgaggccttggagactcaggagttttgagagcaaaatgacaacacccagaaattcagtaaatgggactttcccggcagagccaatgaaaggccctattgctatgcaatctggtccaaaaccactcttcaggaggatgtcttcactggtgggccccacgcaaagcttcttcatgagggaatctaagactttgggggctgtccagattatgaatgggctcttccacattgccctggggggtcttctgatgatcccagcagggatctatgcacccatctgtgtgactgtgtggtaccctctctggggaggcattatgtatattatttccggatcactcctggcagcaacggagaaaaactccaggaagtgtttggtcaaaggaaaaatgataatgaattcattgagcctctttgctgccatttctggaatgattctttcaatcatggacatacttaatattaaaatttcccattttttaaaaatggagagtctgaattttattagagctcacacaccatatattaacatatacaactgtgaaccagctaatccctctgagaaaaactccccatctacccaatactgttacagcatacaatctctgttcttgggcattttgtcagtgatgctgatctttgccttcttccaggaacttgtaatagctggcatcgttgagaatgaatggaaaagaacgtgctccagacccaaatctaacatagttctcctgtcagcagaagaaaaaaaagaacagactattgaaataaaagaagaagtggttgggctaactgaaacatcttcccaaccaaagaatgaagaagacattgaaattattccaatccaagaagaggaagaagaagaaacagagacgaactttccagaacctccccaagatcaggaatcctcaccaatagaaaatgacagctctccttaagtgatttcttctgttttctgtttccttttttaaacattagtgttcatagcttccaagagacatgctgactttcatttcttgaggtactctgcacatacgcaccacatctctatctggcctttgcatggagtgaccatagctccttctctcttacattgaatgtagagaatgtagccattgtagcagcttgtgttgtcacgcttcttcttttgagcaactttcttacactgaagaaaggcagaatgagtgcttcagaatgtgatttcctactaacctgttccttggataggctttttagtatagtatttttttttgtcattttctccatcaacaaccagggagactgcacctgatggaaaagatatatgactgcttcatgacattcctaaactatcttttttttattccacatctacgtttttggtggagtcccttttgcatcattgttttaaggatgataaaaaaaaaataacaactagggacaatacagaacccattccatttatctttctacagggctgacattgtggcacattcttagagttaccacaccccatgagggaagctctaaatagccaacacccatctgttttttgtaaaaacagcatagctt

SEQ ID NO: 14 - protein, 297 aa, Homo sapiens; identical to SEQ ID NO: 10

SEQ ID NO: 15 - DNA, 1932 bp, Homo sapiens
gcatcccctgcgcgaagctgggtgccccggagagtctgaccaccatgccacctcctcgcctcctcttcttcctcctcttcctcacccccatggaagtcaggcccgaggaacctctagtggtgaaggtggaagagggagataacgctgtgctgcagtgcctcaaggggacctcagatggccccactcagcagctgacctggtctcgggagtccccgcttaaacccttcttaaaactcagcctggggctgccaggcctgggaatccacatgaggcccctggccatctggcttttcatcttcaacgtctctcaacagatggggggcttctacctgtgccagccggggcccccctctgagaaggcctggcagcctggctggacagtcaatgtggagggcagcggggagctgttccggtggaatgtttcggacctaggtggcctgggctgtggcctgaagaacaggtcctcagagggccccagctccccttccgggaagctcatgagccccaagctgtatgtgtgggccaaagaccgccctgagatctgggagggagagcctccgtgtgtcccaccgagggacagcctgaaccagagcctcagccaggacctcaccatggcccctggctccacactctggctgtcctgtggggtaccccctgactctgtgtccaggggccccctctcctggacccatgtgcaccccaaggggcctaagtcattgctgagcctagagctgaaggacgatcgcccggccagagatatgtgggtaatggagacgggtctgttgttgccccgggccacagctcaagacgctggaaagtattattgtcaccgtggcaacctgaccatgtcattccacctggagatcactgctcggccagtactatggcactggctgctgaggactggtggctggaaggtctcagctgtgactttggcttatctgatcttctgcctgtgttcccttgtgggcattcttcatcttcaaagagccctggtcctgaggaggaaaagaaagcgaatgactgaccccaccaggagattcttcaaagtgacgcctcccccaggaagcgggccccagaaccagtacgggaacgtgctgtctctccccacacccacctcaggcctcggacgcgcccagcgttgggccgcaggcctggggggcactgccccgtcttatggaaacccgagcagcgacgtccaggcggatggagccttggggtcccggagcccgccgggagtgggcccagaagaagaggaaggggagggctatgaggaacctgacagtgaggaggactccgagttctatgagaacgactccaaccttgggcaggaccagctctcccaggatggcagcggctacgagaaccctgaggatgagcccctgggtcctgaggatgaagactccttctccaacgctgagtcttatgagaacgaggatgaagagctgacccagccggtcgccaggacaatggacttcctgagccctcatgggtcagcctgggaccccagccgggaagcaacctccctggggtcccagtcctatgaggatatgagaggaatcctgtatgcagccccccagctccgctccattcggggccagcctggacccaatcatgaggaagatgcagactcttatgagaacatggataatcccgatgggccagacccagcctggggaggagggggccgcatgggcacctggagcaccaggtgatcctcaggtggccagcctggatctcctcaagtccccaagattcacacctgactctgaaatctgaagacctcgagcagatgatgccaacctctggagcaatgttgcttaggatgtgtgcatgtgtgtaagtgtgtgtgtgtgtgtgtgtgtgtatacatgccagtgacacttccagtcccctttgtattccttaaataaactcaatgagctcttccaa

SEQ ID NO: 16 - protein, 556 aa, Homo sapiens
MPPPRLLFFLLFLTPMEVRPEEPLVVKVEEGDNAVLQCLKGTSDGPTQQLTWSRESPLKPFLKLSLGLPGLGIHMRPLAIWLFIFNVSQQMGGFYLCQPGPPSEKAWQPGWTVNVEGSGELFRWNVSDLGGLGCGLKNRSSEGPSSPSGKLMSPKLYVWAKDRPEIWEGEPPCVPPRDSLNQSLSQDLTMAPGSTLWLSCGVPPDSVSRGPLSWTHVHPKGPKSLLSLELKDDRPARDMWVMETGLLLPRATAQDAGKYYCHRGNLTMSFHLEITARPVLWHWLLRTGGWKVSAVTLAYLIFCLCSLVGILHLQRALVLRRKRKRMTDPTRRFFKVTPPPGSGPQNQYGNVLSLPTPTSGLGRAQRWAAGLGGTAPSYGNPSSDVQADGALGSRSPPGVGPEEEEGEGYEEPDSEEDSEFYENDSNLGQDQLSQDGSGYENPEDEPLGPEDEDSFSNAESYENEDEELTQPVARTMDFLSPHGSAWDPSREATSLGSQSYEDMRGILYAAPQLRSIRGQPGPNHEEDADSYENMDNPDGPDPAWGGGGRMGTWSTR

SEQ ID NO: 17 - DNA, 516 bp, Homo sapiens
atggaacatagcacgtttctctctggcctggtactggctacccttctctcgcaagtgagccccttcaagatacctatagaggaacttgaggacagagtgtttgtgaattgcaataccagcatcacatgggtagagggaacggtgggaacactgctctcagacattacaagactggacctgggaaaacgcatcctggacccacgaggaatatataggtgtaatgggacagatatatacaaggacaaagaatctaccgtgcaagttcattatcgaatgtgccagagctgtgtggagctggatccagccaccgtggctggcatcattgtcactgatgtcattgccactctgctccttgctttgggagtcttctgctttgctggacatgagactggaaggctgtctggggctgccgacacacaagctctgttgaggaatgaccaggtctatcagcccctccgagatcgagatgatgctcagtacagccaccttggaggaaactgggctcggaacaagtga

SEQ ID NO: 18 - protein, 171 aa, Homo sapiens
MEHSTFLSGLVLATLLSQVSPFKIPIEELEDRVFVNCNTSITWVEGTVGTLLSDITRLDLGKRILDPRGIYRCNGTDIYKDKESTVQVHYRMCQSCVELDPATVAGIIVTDVIATLLLALGVFCFAGHETGRLSGAADTQALLRNDQVYQPLRDRDDAQYSHLGGNWARNK

SEQ ID NO: 19 - DNA, 1311 bp, Homo sapiens
gtaagtctgctggcctccgccatcttagtaaagtaacagtcccatgaaacaaagatgcagtcgggcactcactggagagttctgggcctctgcctcttatcagttggcgtttgggggcaagatggtaatgaagaaatgggtggtattacacagacaccatataaagtctccatctctggaaccacagtaatattgacatgccctcagtatcctggatctgaaatactatggcaacacaatgataaaaacataggcggtgatgaggatgataaaaacataggcagtgatgaggatcacctgtcactgaaggaattttcagaattggagcaaagtggttattatgtctgctaccccagaggaagcaaaccagaagatgcgaacttttatctctacctgagggcaagagtgtgtgagaactgcatggagatggatgtgatgtcggtggccacaattgtcatagtggacatctgcatcactgggggcttgctgctgctggtttactactggagcaagaatagaaaggccaaggccaagcctgtgacacgaggagcgggtgctggcggcaggcaaaggggacaaaacaaggagaggccaccacctgttcccaacccagactatgagcccatccggaaaggccagcgggacctgtattctggcctgaatcagagacgcatctgaccctctggagaacactgcctcccgctggcccaggtctcctctccagtccccctgcgactccctgtttcctgggctagtcttggaccccacgagagagaatcgttcctcagcctcatggtgaactcgcgccctccagcctgatcccccgctccctcctccctgccttctctgctggtacccagtcctaaaatattgctgcttcctcttcctttgaagcatcatcagtagtcacaccctcacagctggcctgccctcttgccaggatatttatttgtgctattcactcccttccctttggatgtaacttctccgttcagttccctccttttcttgcatgtaagttgtcccccatcccaaagtattccatctacttttctatcgccgtccccttttgcagccctctctggggatggactgggtaaatgttgacagaggccctgccccgttcacagatcctggccctgagccagccctgtgctcctccctcccccaacactccctaccaaccccctaatcccctactccctccaaccccccctcccactgtaggccactggatggtcatttggcatctccgtatatgtgctctggctcctcagctgagagagaaaaaaataaactgtatttggctgc

SEQ ID NO: 20 - protein, 207 aa, Homo sapiens
MQSGTHWRVLGLCLLSVGVWGQDGNEEMGGITQTPYKVSISGTTVILTCPQYPGSEILWQHNDKNIGGDEDDKNIGSDEDHLSLKEFSELEQSGYYVCYPRGSKPEDANFYLYLRARVCENCMEMDVMSVATIVIVDICITGGLLLLVYYWSKNRKAKAKPVTRGAGAGGRQRGQNKERPPPVPNPDYEPIRKGQRDLYSGLNQRRI

SEQ ID NO: 21 - DNA, 822 bp, Homo sapiens
gggctgctccacgcttttgccggagacagagactgacatggaacaggggaagggcctggctgtcctcatcctggctatcattcttcttcaaggtactttggcccagtcaatcaaaggaaaccacttggttaaggtgtatgactatcaagaagatggttcggtacttctgacttgtgatgcagaagccaaaaatatcacatggtttaaagatgggaagatgatcggcttcctaactgaagataaaaaaaaatggaatctgggaagtaatgccaaggaccctcgagggatgtatcagtgtaaaggatcacagaacaagtcaaaaccactccaagtgtattacagaatgtgtcagaactgcattgaactaaatgcagccaccatatctggctttctctttgctgaaatcgtcagcattttcgtccttgctgttggggtctacttcattgctggacaggatggagttcgccagtcgagagcttcagacaagcagactctgttgcccaatgaccagctctaccagcccctcaaggatcgagaagatgaccagtacagccaccttcaaggaaaccagttgaggaggaattgaactcaggactcagagtagtccaggtgttctcctcctattcagttcccagaatcaaagcaatgcattttggaaagctcctagcagagagactttcagccctaaatctagactcaaggttcccagagatgacaaatggagaagaaaggccatcagagcaaatttgggggtttctcaaataaaataaaaataaaaacaaatactgtgtttcagaagcgccacctattggggaaaattgt

SEQ ID NO: 22 - protein, 182 aa, Homo sapiens
MEQGKGLAVLILAIILLQGTLAQSIKGNHLVKVYDYQEDGSVLLTCDAEAKNITWFKDGKMIGFLTEDKKKWNLGSNAKDPRGMYQCKGSQNKSKPLQVYYRMCQNCIELNAATISGFLFAEIVSIFVLAVGVYFIAGQDGVRQSRASDKQTLLPNDQLYQPLKDREDDQYSHLQGNQLRRN

SEQ ID NO: 23 - DNA, 1723 bp, Homo sapiens
gggggagtgcgaatttcttggcctgtcggcaggtgctttctcaaaggccccacagtcctccacttcctggggaggtagctgcagaataaaaccagcagagactccttttctcctaaccgtcccggccaccgctgcctcagcctctgcctcccagcctctttctgagggaaaggacaagatgaagtggaaggcgcttttcaccgcggccatcctgcaggcacagttgccgattacagaggcacagagctttggcctgctggatcccaaactctgctacctgctggatggaatcctcttcatctatggtgtcattctcactgccttgttcctgagagtgaagttcagcaggagcgcagacgcccccgcgtaccagcagggccagaaccagctctataacgagctcaatctaggacgaagagaggagtacgatgttttggacaagagacgtggccgggaccctgagatggggggaaagccgagaaggaagaaccctcaggaaggcctgtacaatgaactgcagaaagataagatggcggaggcctacagtgagattgggatgaaaggcgagcgccggaggggcaaggggcacgatggcctttaccagggtctcagtacagccaccaaggacacctacgacgcccttcacatgcaggccctgccccctcgctaacagccaggggatttcaccactcaaaggccagacctgcagacgcccagattatgagacacaggatgaagcatttacaacccggttcactcttctcagccactgaagtattcccctttatgtacaggatgctttggttatatttagctccaaaccttcacacacagactgttgtccctgcactctttaagggagtgtactcccagggcttacggccctgccttgggccctctggtttgccggtggtgcaggtagacctgtctcctggcggttcctcgttctccctgggaggcgggcgcactgcctctcacagctgagttgttgagtctgttttgtaaagtccccagagaaagcgcagatgctagcacatgccctaatgtctgtatcactctgtgtctgagtggcttcactcctgctgtaaatttggcttctgttgtcaccttcacctcctttcaaggtaactgtactgggccatgttgtgcctccctggtgagagggccgggcagaggggcagatggaaaggagcctaggccaggtgcaaccagggagctgcaggggcatgggaaggtgggcgggcaggggagggtcagccagggcctgcgagggcagcgggagcctccctgcctcaggcctctgtgccgcaccattgaactgtaccatgtgctacaggggccagaagatgaacagactgaccttgatgagctgtgcacaaagtggcataaaaaacagtgtggttacacagtgtgaataaagtgctgcggagcaagaggaggccgttgattcacttcacgctttcagcgaatgacaaaatcatctttgtgaaggcctcgcaggaagacgcaacacatgggacctataactgcccagcggacagtggcaggacaggaaaaacccgtcaatgtactagggtactgctgcgtcattacagggcacaggccatggatggaaaacgctctctgctctgctttttttctactgttttaatttatactggcatgctattgccttcctattttgcataataaatgcttcagtgaaaatgcagctttactctaa

SEQ ID NO: 24 - protein, 163 aa, Homo sapiens
MKWKALFTAAILQAQLPITEAQSFGLLDPKLCYLLDGILFIYGVILTALFLRVKFSRSADAPAYQQGQNQLYNELNLGRREEYDVLDKRRGRDPEMGGKPRRKNPQEGLYNELQKDKMAEAYSEIGMKGERRRGKGHDGLYQGLSTATKDTYDALHMQALPPR

SEQ ID NO: 25 - DNA, 3084 bp, Homo sapiens
ctgggctcctggttgcagagctccaagtcctcacacagatacgcctgtttgagaagcagcgggcaagaaagacgcaagcccagaggccctgccatttctgtgggctcaggtccctactggctcaggcccctgcctccctcggcaaggccacaatgaaccggggagtcccttttaggcacttgcttctggtgctgcaactggcgctcctcccagcagccactcagggaaagaaagtggtgctgggcaaaaaaggggatacagtggaactgacctgtacagcttcccagaagaagagcatacaattccactggaaaaactccaaccagataaagattctgggaaatcagggctccttcttaactaaaggtccatccaagctgaatgatcgcgctgactcaagaagaagcctttgggaccaaggaaactttcccctgatcatcaagaatcttaagatagaagactcagatacttacatctgtgaagtggaggaccagaaggaggaggtgcaattgctagtgttcggattgactgccaactctgacacccacctgcttcaggggcagagcctgaccctgaccttggagagcccccctggtagtagcccctcagtgcaatgtaggagtccaaggggtaaaaacatacagggggggaagaccctctccgtgtctcagctggagctccaggatagtggcacctggacatgcactgtcttgcagaaccagaagaaggtggagttcaaaatagacatcgtggtgctagctttccagaaggcctccagcatagtctataagaaagagggggaacaggtggagttctccttcccactcgcctttacagttgaaaagctgacgggcagtggcgagctgtggtggcaggcggagagggcttcctcctccaagtcttggatcacctttgacctgaagaacaaggaagtgtctgtaaaacgggttacccaggaccctaagctccagatgggcaagaagctcccgctccacctcaccctgccccaggccttgcctcagtatgctggctctggaaacctcaccctggcccttgaagcgaaaacaggaaagttgcatcaggaagtgaacctggtggtgatgagagccactcagctccagaaaaatttgacctgtgaggtgtggggacccacctcccctaagctgatgctgagcttgaaactggagaacaaggaggcaaaggtctcgaagcgggagaaggcggtgtgggtgctgaaccctgaggcggggatgtggcagtgtctgctgagtgactcgggacaggtcctgctggaatccaacatcaaggttctgcccacatggtccaccccggtgcagccaatggccctgattgtgctggggggcgtcgccggcctcctgcttttcattgggctaggcatcttcttctgtgtcaggtgccggcaccgaaggcgccaagcagagcggatgtctcagatcaagagactcctcagtgagaagaagacctgccagtgccctcaccggtttcagaagacatgtagccccatttgaggcacgaggccaggcagatcccacttgcagcctccccaggtgtctgccccgcgtttcctgcctgcggaccagatgaatgtagcagatcccaggcctctggcctcctgttcgcctcctctacaatttgccattgtttctcctgggttaggccccggcttcactggttgagtgttgctctctagtttccagaggcttaatcacaccgtcctccacgccatttccttttccttcaagcctagcccttctctcattatttctctctgaccctctccccactgctcatttggatcccaggggagtgttcagggccagccctggctggcatggagggtgaggctgggtgtctggaagcatggagcatgggactgttcttttacaagacaggaccctgggaccacagagggcaggagcttgcacgaaatcacacagccaagccagtcaaggatggatgcagatccagaggtttctggcagccagtacctcctgccccatgctgcccgcttctcaccctatgtgggtggggccacagactcacatcctgaccttgcacaaacagcccctctggacacagccccatgtacacggcctcaagggatgtctcacatcctctgtctatttgagacttagaaaaatcctacaaggctggcagtgacagaactaagatgatcatctccagtttatagaccagaaccagagctcagagaggctagatgattgattaccaagtgccggactagcaagtgctggagtcgggactaacccaggtcccttgtcccaagttccactgctgcctcttgaatgcagggacaaatgccacacggctctcaccagtggctagtggtgggtactcaatgtgtacttttgggttcacagaagcacagcacccatgggaagggtccatctcagagaatttacgagcagggatgaaggcctccctgtctaaaatccctccttcatcccccgctggtggcagaatctgttaccagaggacaaagcctttggctcttctaatcagagtgcaagctgggagcacaggcactgcaggagagaatgcccagtgaccagtcactgaccctgtgcagaacctcctggaagcgagctttgctgggagagggggtagctagcctgagagggaaccctccaagggacctcaaaggtgattgtgccaggctctgcgcctgccccacaccctcccttaccctcctccagaccattcaggacacagggaaatcagggttacaaatcttcttgatccacttctctcaggatcccctctcttcctacccttcctcaccacttccctcagtcccaactccttttccctatttccttctcctcctgtctttaaagcctgcctcttccaggaagacccccctattgctgctggggctccccatttgcttactttgcatttgtgcccactctccacccctgctcccctgagctgaaataaaaatacaataaacttactataaagataaaaaaaaaaaaaaaaaaaaaaaaaaaaaaaaaaaaaaaaaaaaaaaaaaaaaaaaaaaaaaaaaaaaaaaaaaaa

SEQ ID NO: 26 - protein, 458 aa, Homo sapiens
MNRGVPFRHLLLVLQLALLPAATQGKKVVLGKKGDTVELTCTASQKKSIQFHWKNSNQIKILGNQGSFLTKGPSKLNDRADSRRSLWDQGNFPLIIKNLKIEDSDTYICEVEDQKEEVQLLVFGLTANSDTHLLQGQSLTLTLESPPGSSPSVQCRSPRGKNIQGGKTLSVSQLELQDSGTWTCTVLQNQKKVEFKIDIVVLAFQKASSIVYKKEGEQVEFSFPLAFTVEKLTGSGELWWQAERASSSKSWITFDLKNKEVSVKRVTQDPKLQMGKKLPLHLTLPQALPQYAGSGNLTLALEAKTGKLHQEVNLVVMRATQLQKNLTCEVWGPTSPKLMLSLKLENKEAKVSKREKAVWVLNPEAGMWQCLLSDSGQVLLESNIKVLPTWSTPVQPMALIVLGGVAGLLLFIGLGIFFCVRCRHRRRQAERMSQIKRLLSEKKTCQCPHRFQKTCSPI

SEQ ID NO: 27 - DNA, 2261 bp, Homo sapiens
gaaatcaggctccgggccggccgaagggcgcaactttcccccctcggcgccccaccggctcccgcgcgcctcccctcgcgcccgagcttcgagccaagcagcgtcctggggagcgcgtcatggccttaccagtgaccgccttgctcctgccgctggccttgctgctccacgccgccaggccgagccagttccgggtgtcgccgctggatcggacctggaacctgggcgagacagtggagctgaagtgccaggtgctgctgtccaacccgacgtcgggctgctcgtggctcttccagccgcgcggcgccgccgccagtcccaccttcctcctatacctctcccaaaacaagcccaaggcggccgaggggctggacacccagcggttctcgggcaagaggttgggggacaccttcgtcctcaccctgagcgacttccgccgagagaacgagggctactatttctgctcggccctgagcaactccatcatgtacttcagccacttcgtgccggtcttcctgccagcgaagcccaccacgacgccagcgccgcgaccaccaacaccggcgcccaccatcgcgtcgcagcccctgtccctgcgcccagaggcgtgccggccagcggcggggggcgcagtgcacacgagggggctggacttcgcctgtgatatctacatctgggcgcccttggccgggacttgtggggtccttctcctgtcactggttatcaccctttactgcaaccacaggaaccgaagacgtgtttgcaaatgtccccggcctgtggtcaaatcgggagacaagcccagcctttcggcgagatacgtctaaccctgtgcaacagccactacattacttcaaactgagatccttccttttgagggagcaagtccttccctttcattttttccagtcttcctccctgtgtattcattctcatgattattattttagtgggggcggggtgggaaagattactttttctttatgtgtttgacgggaaacaaaactaggtaaaatctacagtacaccacaagggtcacaatactgttgtgcgcacatcgcggtagggcgtggaaaggggcaggccagagctacccgcagagttctcagaatcatgctgagagagctggaggcacccatgccatctcaacctcttccccgcccgttttacaaagggggaggctaaagcccagagacagcttgatcaaaggcacacagcaagtcagggttggagcagtagctggagggaccttgtctcccagctcagggctctttcctccacaccattcaggtctttctttccgaggcccctgtctcagggtgaggtgcttgagtctccaacggcaagggaacaagtacttcttgatacctgggatactgtgcccagagcctcgaggaggtaatgaattaaagaagagaactgcctttggcagagttctataatgtaaacaatatcagactttttttttttataatcaagcctaaaattgtatagacctaaaataaaatgaagtggtgagcttaaccctggaaaatgaatccctctatctctaaagaaaatctctgtgaaacccctatgtggaggcggaattgctctcccagcccttgcattgcagaggggcccatgaaagaggacaggctacccctttacaaatagaatttgagcatcagtgaggttaaactaaggccctcttgaatctctgaatttgagatacaaacatgttcctgggatcactgatgactttttatactttgtaaagacaattgttggagagcccctcacacagccctggcctctgctcaactagcagatacagggatgaggcagacctgactctcttaaggaggctgagagcccaaactgctgtcccaaacatgcacttccttgcttaaggtatggtacaagcaatgcctgcccattggagagaaaaaacttaagtagataaggaaataagaaccactcataattcttcaccttaggaataatctcctgttaatatggtgtacattcttcctgattattttctacacatacatgtaaaatatgtctttcttttttaaatagggttgtactatgctgttatgagtggctttaatgaataaacatttgtagcatcctctttaatgggtaaacagcaaaaaaaaaaaaaaaaaaaaaaaaaaaaaaaaaaaaaaaaaaaaaaaaaaaaaaaaaaaaaaaaaaaaaaaaaaaaaaaaaaaaaaaaaaaaaaaaaaaaaaaaaaaaaaaaaaaaaaaaaaaaa

SEQ ID NO: 28 - protein, 235 aa, Homo sapiens
MALPVTALLLPLALLLHAARPSQFRVSPLDRTWNLGETVELKCQVLLSNPTSGCSWLFQPRGAAASPTFLLYLSQNKPKAAEGLDTQRFSGKRLGDTFVLTLSDFRRENEGYYFCSALSNSIMYFSHFVPVFLPAKPTTTPAPRPPTPAPTIASQPLSLRPEACRPAAGGAVHTRGLDFACDIYIWAPLAGTCGVLLLSLVITLYCNHRNRRRVCKCPRPVVKSGDKPSLSARYV

SEQ ID NO: 29 - DNA, 2150 bp, Homo sapiens
gaaatcaggctccgggccggccgaagggcgcaactttcccccctcggcgccccaccggctcccgcgcgcctcccctcgcgcccgagcttcgagccaagcagcgtcctggggagcgcgtcatggccttaccagtgaccgccttgctcctgccgctggccttgctgctccacgccgccaggccgagccagttccgggtgtcgccgctggatcggacctggaacctgggcgagacagtggagctgaagtgccaggtgctgctgtccaacccgacgtcgggctgctcgtggctcttccagccgcgcggcgccgccgccagtcccaccttcctcctatacctctcccaaaacaagcccaaggcggccgaggggctggacacccagcggttctcgggcaagaggttgggggacaccttcgtcctcaccctgagcgacttccgccgagagaacgagggctactatttctgctcggccctgagcaactccatcatgtacttcagccacttcgtgccggtcttcctgccagcgaagcccaccacgacgccagcgccgcgaccaccaacaccggcgcccaccatcgcgtcgcagcccctgtccctgcgcccagaggcgtgccggccagcggcggggggcgcagggaaccgaagacgtgtttgcaaatgtccccggcctgtggtcaaatcgggagacaagcccagcctttcggcgagatacgtctaaccctgtgcaacagccactacattacttcaaactgagatccttccttttgagggagcaagtccttccctttcattttttccagtcttcctccctgtgtattcattctcatgattattattttagtgggggcggggtgggaaagattactttttctttatgtgtttgacgggaaacaaaactaggtaaaatctacagtacaccacaagggtcacaatactgttgtgcgcacatcgcggtagggcgtggaaaggggcaggccagagctacccgcagagttctcagaatcatgctgagagagctggaggcacccatgccatctcaacctcttccccgcccgttttacaaagggggaggctaaagcccagagacagcttgatcaaaggcacacagcaagtcagggttggagcagtagctggagggaccttgtctcccagctcagggctctttcctccacaccattcaggtctttctttccgaggcccctgtctcagggtgaggtgcttgagtctccaacggcaagggaacaagtacttcttgatacctgggatactgtgcccagagcctcgaggaggtaatgaattaaagaagagaactgcctttggcagagttctataatgtaaacaatatcagactttttttttttataatcaagcctaaaattgtatagacctaaaataaaatgaagtggtgagcttaaccctggaaaatgaatccctctatctctaaagaaaatctctgtgaaacccctatgtggaggcggaattgctctcccagcccttgcattgcagaggggcccatgaaagaggacaggctacccctttacaaatagaatttgagcatcagtgaggttaaactaaggccctcttgaatctctgaatttgagatacaaacatgttcctgggatcactgatgactttttatactttgtaaagacaattgttggagagcccctcacacagccctggcctctgctcaactagcagatacagggatgaggcagacctgactctcttaaggaggctgagagcccaaactgctgtcccaaacatgcacttccttgcttaaggtatggtacaagcaatgcctgcccattggagagaaaaaacttaagtagataaggaaataagaaccactcataattcttcaccttaggaataatctcctgttaatatggtgtacattcttcctgattattttctacacatacatgtaaaatatgtctttcttttttaaatagggttgtactatgctgttatgagtggctttaatgaataaacatttgtagcatcctctttaatgggtaaacagcaaaaaaaaaaaaaaaaaaaaaaaaaaaaaaaaaaaaaaaaaaaaaaaaaaaaaaaaaaaaaaaaaaaaaaaaaaaaaaaaaaaaaaaaaaaaaaaaaaaaaaaaaaaaaaaaaaaaaaaaaaaaa

SEQ ID NO: 30 - protein, 198 aa, Homo sapiens
MALPVTALLLPLALLLHAARPSQFRVSPLDRTWNLGETVELKCQVLLSNPTSGCSWLFQPRGAAASPTFLLYLSQNKPKAAEGLDTQRFSGKRLGDTFVLTLSDFRRENEGYYFCSALSNSIMYFSHFVPVFLPAKPTTTPAPRPPTPAPTIASQPLSLRPEACRPAAGGAGNRRRVCKCPRPVVKSGDKPSLSARYV

SEQ ID NO: 31 - DNA, 1468 bp, Homo sapiens
gcgactgtctccgccgagcccccggggccaggtgtcccgggcgcgccacgatgcggccgcggctgtggctcctcctggccgcgcagctgacagttctccatggcaactcagtcctccagcagacccctgcatacataaaggtgcaaaccaacaagatggtgatgctgtcctgcgaggctaaaatctccctcagtaacatgcgcatctactggctgagacagcgccaggcaccgagcagtgacagtcaccacgagttcctggccctctgggattccgcaaaagggactatccacggtgaagaggtggaacaggagaagatagctgtgtttcgggatgcaagccggttcattctcaatctcacaagcgtgaagccggaagacagtggcatctacttctgcatgatcgtcgggagccccgagctgaccttcgggaagggaactcagctgagtgtggttgatttccttcccaccactgcccagcccaccaagaagtccaccctcaagaagagagtgtgccggttacccaggccagagacccagaagggcccactttgtagccccatcacccttggcctgctggtggctggcgtcctggttctgctggtttccctgggagtggccatccacctgtgctgccggcggaggagagcccggcttcgtttcatgaaacagaaattcaatatcgtttgcctgaaaataagtggtttcacaacttgctgttgttttcagattttacaaatgagcagagaatacggttttggtgtcctgctacaaaaagacatcggtcagtaacgagcacgatgtggaaaaatgagagaagggacacattcaaccctggagagttcaatggctgctgaagctgcctgcttttcactgctgcaaggcctttctgtgtgtgatgtgcatgggagcaacttgttcgtgggtcatcgggaatactagggagaaggtttcattgcccccagggcacttcacagagtgtgctggaggactgagtaagaaatgctgcccatgccaccgcttccggctcctgtgctttccctgaactgggacctttagtggtggccatttagccaccatctttgcaggttgctttgccctggtagggcagtaacattgggtcctgggtctttcatggggtgatgctgggctggctccctcttggtcttcccaggctggggctgaccttcctcgcagagaggccaggtgcaggttgggaatgaggcttgctgagaggggctgtccagttcccagaaggcatatcagtctctgagggcttcctttggggccgggaacttgcgggtttgaggataggagttcacttcatcttctcagctcccatttctactcttaagtttctcagctcccatttctactctcccatggcttaatgcttctttcattttctgtttgttttatacaaatgtcttagttgtacaaataaagtcccaggttaaagataaaaaaaa

SEQ ID NO: 32 - protein, 246 aa, Homo sapiens
MRPRLWLLLAAQLTVLHGNSVLQQTPAYIKVQTNKMVMLSCEAKISLSNMRIYWLRQRQAPSSDSHHEFLALWDSAKGTIHGEEVEQEKIAVFRDASRFILNLTSVKPEDSGIYFCMIVGSPELTFGKGTQLSVVDFLPTTAQPTKKSTLKKRVCRLPRPETQKGPLCSPITLGLLVAGVLVLLVSLGVAIHLCCRRRRARLRFMKQKFNIVCLKISGFTTCCCFQILQMSREYGFGVLLQKDIGQ

SEQ ID NO: 33 - DNA, 1065 bp, Homo sapiens
gcgactgtctccgccgagcccccggggccaggtgtcccgggcgcgccacgatgcggccgcggctgtggctcctcctggccgcgcagctgacagttctccatggcaactcagtcctccagcagacccctgcatacataaaggtgcaaaccaacaagatggtgatgctgtcctgcgaggctaaaatctccctcagtaacatgcgcatctactggctgagacagcgccaggcaccgagcagtgacagtcaccacgagttcctggccctctgggattccgcaaaagggactatccacggtgaagaggtggaacaggagaagatagctgtgtttcgggatgcaagccggttcattctcaatctcacaagcgtgaagccggaagacagtggcatctacttctgcatgatcgtcgggagccccgagctgaccttcgggaagggaactcagctgagtgtggttgatttccttcccaccactgcccagcccaccaagaagtccaccctcaagaagagagtgtgccggttacccaggccagagacccagaagggcccactttgtagccccatcacccttggcctgctggtggctggcgtcctggttctgctggtttccctgggagtggccatccacctgtgctgccggcggaggagagcccggcttcgtttcatgaaacagcctcaaggggaaggtatatcaggaacctttgtcccccaatgcctgcatggatactacagcaatactacaacctcacagaagctgcttaacccatggatcctgaaaacataggcaagaagcacaggtcctgatgagtggatctttactacttttaccagattcctccctcgctcagagggatcctcccacacacccagcagagacttctctgccaccatcaaccccccaagtcatagggggctcaagttctgccctggtgagctgtggcccccatccttgtgaaccccaaagtgtcccccttgtggaaccaaatgtatccatcttgaataaatttgcccaaaatcctaaagaccgggaaaagggaaccattgagcttggcaaaaaaaaaaaaaaa

SEQ ID NO: 34 - protein, 243 aa, Homo sapiens
MRPRLWLLLAAQLTVLHGNSVLQQTPAYIKVQTNKMVMLSCEAKISLSNMRIYWLRQRQAPSSDSHHEFLALWDSAKGTIHGEEVEQEKIAVFRDASRFILNLTSVKPEDSGIYFCMIVGSPELTFGKGTQLSVVDFLPTTAQPTKKSTLKKRVCRLPRPETQKGPLCSPITLGLLVAGVLVLLVSLGVAIHLCCRRRRARLRFMKQPQGEGISGTFVPQCLHGYYSNTTTSQKLLNPWILKT

SEQ ID NO: 35 - DNA, 1119 bp, Homo sapiens
gcgactgtctccgccgagcccccggggccaggtgtcccgggcgcgccacgatgcggccgcggctgtggctcctcctggccgcgcagctgacagttctccatggcaactcagtcctccagcagacccctgcatacataaaggtgcaaaccaacaagatggtgatgctgtcctgcgaggctaaaatctccctcagtaacatgcgcatctactggctgagacagcgccaggcaccgagcagtgacagtcaccacgagttcctggccctctgggattccgcaaaagggactatccacggtgaagaggtggaacaggagaagatagctgtgtttcgggatgcaagccggttcattctcaatctcacaagcgtgaagccggaagacagtggcatctacttctgcatgatcgtcgggagccccgagctgaccttcgggaagggaactcagctgagtgtggttgatttccttcccaccactgcccagcccaccaagaagtccaccctcaagaagagagtgtgccggttacccaggccagagacccagaagggcccactttgtagccccatcacccttggcctgctggtggctggcgtcctggttctgctggtttccctgggagtggccatccacctgtgctgccggcggaggagagcccggcttcgtttcatgaaacaactaagattacatccactggagaaatgttccagaatggactactgaatatacaggcctcaaggggaaggtatatcaggaacctttgtcccccaatgcctgcatggatactacagcaatactacaacctcacagaagctgcttaacccatggatcctgaaaacataggcaagaagcacaggtcctgatgagtggatctttactacttttaccagattcctccctcgctcagagggatcctcccacacacccagcagagacttctctgccaccatcaaccccccaagtcatagggggctcaagttctgccctggtgagctgtggcccccatccttgtgaaccccaaagtgtcccccttgtggaaccaaatgtatccatcttgaataaatttgcccaaaatcctaaagaccgggaaaagggaaccattgagcttggcaaaaaaaaaaaaaaa

SEQ ID NO: 36 - protein, 221 aa, Homo sapiens
MRPRLWLLLAAQLTVLHGNSVLQQTPAYIKVQTNKMVMLSCEAKISLSNMRIYWLRQRQAPSSDSHHEFLALWDSAKGTIHGEEVEQEKIAVFRDASRFILNLTSVKPEDSGIYFCMIVGSPELTFGKGTQLSVVDFLPTTAQPTKKSTLKKRVCRLPRPETQKGPLCSPITLGLLVAGVLVLLVSLGVAIHLCCRRRRARLRFMKQLRLHPLEKCSRMDY

SEQ ID NO: 37 - DNA, 945 bp, Homo sapiens
gcgactgtctccgccgagcccccggggccaggtgtcccgggcgcgccacgatgcggccgcggctgtggctcctcctggccgcgcagctgacagttctccatggcaactcagtcctccagcagacccctgcatacataaaggtgcaaaccaacaagatggtgatgctgtcctgcgaggctaaaatctccctcagtaacatgcgcatctactggctgagacagcgccaggcaccgagcagtgacagtcaccacgagttcctggccctctgggattccgcaaaagggactatccacggtgaagaggtggaacaggagaagatagctgtgtttcgggatgcaagccggttcattctcaatctcacaagcgtgaagccggaagacagtggcatctacttctgcatgatcgtcgggagccccgagctgaccttcgggaagggaactcagctgagtgtggttgatttccttcccaccactgcccagcccaccaagaagtccaccctcaagaagagagtgtgccggttacccaggccagagacccagaagggccggcggaggagagcccggcttcgtttcatgaaacagcctcaaggggaaggtatatcaggaacctttgtcccccaatgcctgcatggatactacagcaatactacaacctcacagaagctgcttaacccatggatcctgaaaacataggcaagaagcacaggtcctgatgagtggatctttactacttttaccagattcctccctcgctcagagggatcctcccacacacccagcagagacttctctgccaccatcaaccccccaagtcatagggggctcaagttctgccctggtgagctgtggcccccatccttgtgaaccccaaagtgtcccccttgtggaaccaaatgtatccatcttgaataaatttgcccaaaatcctaaaaaaaaaaaaaaaaaa

SEQ ID NO: 38 - protein, 213 aa, Homo sapiens
MRPRLWLLLAAQLTVLHGNSVLQQTPAYIKVQTNKMVMLSCEAKISLSNMRIYWLRQRQAPSSDSHHEFLALWDSAKGTIHGEEVEQEKIAVFRDASRFILNLTSVKPEDSGIYFCMIVGSPELTFGKGTQLSVVDFLPTTAQPTKKSTLKKRVCRLPRPETQKGRRRRARLRFMKQPQGEGISGTFVPQCLHGYYSNTTTSQKLLNPWILKT

SEQ ID NO: 39 - DNA, 1410 bp, Homo sapiens
gcgactgtctccgccgagcccccggggccaggtgtcccgggcgcgccacgatgcggccgcggctgtggctcctcctggccgcgcagctgacagttctccatggcaactcagtcctccagcagacccctgcatacataaaggtgcaaaccaacaagatggtgatgctgtcctgcgaggctaaaatctccctcagtaacatgcgcatctactggctgagacagcgccaggcaccgagcagtgacagtcaccacgagttcctggccctctgggattccgcaaaagggactatccacggtgaagaggtggaacaggagaagatagctgtgtttcgggatgcaagccggttcattctcaatctcacaagcgtgaagccggaagacagtggcatctacttctgcatgatcgtcgggagccccgagctgaccttcgggaagggaactcagctgagtgtggttgatttccttcccaccactgcccagcccaccaagaagtccaccctcaagaagagagtgtgccggttacccaggccagagacccagaagggcccactttgtagccccatcacccttggcctgctggtggctggcgtcctggttctgctggtttccctgggagtggccatccacctgtgctgccggcggaggagagcccggcttcgtttcatgaaacaattttacaaatgagcagagaatacggttttggtgtcctgctacaaaaagacatcggtcagtaacgagcacgatgtggaaaaatgagagaagggacacattcaaccctggagagttcaatggctgctgaagctgcctgcttttcactgctgcaaggcctttctgtgtgtgatgtgcatgggagcaacttgttcgtgggtcatcgggaatactagggagaaggtttcattgcccccagggcacttcacagagtgtgctggaggactgagtaagaaatgctgcccatgccaccgcttccggctcctgtgctttccctgaactgggacctttagtggtggccatttagccaccatctttgcaggttgctttgccctggtagggcagtaacattgggtcctgggtctttcatggggtgatgctgggctggctccctcttggtcttcccaggctggggctgaccttcctcgcagagaggccaggtgcaggttgggaatgaggcttgctgagaggggctgtccagttcccagaaggcatatcagtctctgagggcttcctttggggccgggaacttgcgggtttgaggataggagttcacttcatcttctcagctcccatttctactcttaagtttctcagctcccatttctactctcccatggcttaatgcttctttcattttctgtttgttttatacaaatgtcttagttgtacaaataaagtcccaggttaaagataaaaaaaa

SEQ ID NO: 40 - protein, 210 aa, Homo sapiens
MRPRLWLLLAAQLTVLHGNSVLQQTPAYIKVQTNKMVMLSCEAKISLSNMRIYWLRQRQAPSSDSHHEFLALWDSAKGTIHGEEVEQEKIAVFRDASRFILNLTSVKPEDSGIYFCMIVGSPELTFGKGTQLSVVDFLPTTAQPTKKSTLKKRVCRLPRPETQKGPLCSPITLGLLVAGVLVLLVSLGVAIHLCCRRRRARLRFMKQFYK

SEQ ID NO: 41 - DNA, 882 bp, Homo sapiens
gcgactgtctccgccgagcccccggggccaggtgtcccgggcgcgccacgatgcggccgcggctgtggctcctcctggccgcgcagctgacagttctccatggcaactcagtcctccagcagacccctgcatacataaaggtgcaaaccaacaagatggtgatgctgtcctgcgaggctaaaatctccctcagtaacatgcgcatctactggctgagacagcgccaggcaccgagcagtgacagtcaccacgagttcctggccctctgggattccgcaaaagggactatccacggtgaagaggtggaacaggagaagatagctgtgtttcgggatgcaagccggttcattctcaatctcacaagcgtgaagccggaagacagtggcatctacttctgcatgatcgtcgggagccccgagctgaccttcgggaagggaactcagctgagtgtggttgatttccttcccaccactgcccagcccaccaagaagtccaccctcaagaagagagtgtgccggttacccaggccagagacccagaagggcagactacaataaaaaggatataaaaggcaaatacaatagagccactaagatgagggcgcaagaaccggttgtgtgctacggctgtggagaacccggcaacatcagtttaaacaaagggaagaccccaagttgtatggcaccccaaccccagtgatagaaagaaacaacctgccaccaaaagaagaaaccttcatcctagcactaaattcgagaagcaatctgcccattcatcttcatgtaaggacagctgaatgacggcaaactcagtcatacttttataaatgatggcaaaaacaaaggtcttcagatttcttgcataatttcttttctttctttc

SEQ ID NO: 42 - protein, 168 aa, Homo sapiens
MRPRLWLLLAAQLTVLHGNSVLQQTPAYIKVQTNKMVMLSCEAKISLSNMRIYWLRQRQAPSSDSHHEFLALWDSAKGTIHGEEVEQEKIAVFRDASRFILNLTSVKPEDSGIYFCMIVGSPELTFGKGTQLSVVDFLPTTAQPTKKSTLKKRVCRLPRPETQKGRLQ

SEQ ID NO: 43 - DNA, 1163 bp, Homo sapiens
cagacagcaccatgtcgctcatggtcgtcagcatggtgtgtgttgggttcttcttgctgcagggggcctggccacatgagggagtccacagaaaaccttccctcctggcccacccaggtcccctggtgaaatcagaagagacagtcatcctgcaatgttggtcagatgtcaggtttcagcacttccttctgcacagagaagggaagtttaaggacactttgcacctcattggagagcaccatgatggggtctccaaggccaacttctccatcggtcccatgatgcaagaccttgcagggacctacagatgctacggttctgttactcactccccctatcagttgtcagctccgagtgacccactgcttgtttctgtcacaggaaacccttcaaatagttggctttcacccactgaaccaagctccgaaaccggtaaccccagacacctgcatgttctgattgggacctcagtggtcatcatcctcttcatcctcctcctcttctttctccttcatcgctggtgctgcaacaaaaaaaatgctgttgtaatggaccaagagcctgcagggaacagaacagtgaacagggaggactctgatgaacaagaccctcaggaggtgacatatgcacagttgaatcactgcgttttcacacagagaaaaatcactcacccttctcagaggcccaagacacccccaacagatatcatcgtgtacacggaacttccaaatgctgagccctgatccaaagttgtctcctgcccatgagcaccacagtcaggccttgaggggatcttctagggagacaacagccctgtctcaaaactgggttgccagctccaatgtaccagcagctggaatctgaaggcgtgagtctgcatcttagggcatcgctcttcctcacaccacaaatctgaacgtgcctctctcttgcttacaaatgtctaaggtccccactgcctgctggagagaaaacacactcctttgcttagcccacaattctccatttcacttgacccctgcccacctctccaacctaactggcttacttcctagtctatttgaggctgcaatcacactgaggaactcacaattccaaacatacaagaggctccctcttaacacggcacttagacacgtgctgttccaccttccctcatgctg

SEQ ID NO: 44 - protein, 243 aa, Homo sapiens
MSLMVVSMVCVGFFLLQGAWPHEGVHRKPSLLAHPGPLVKSEETVILQCWSDVRFQHFLLHREGKFKDTLHLIGEHHDGVSKANFSIGPMMQDLAGTYRCYGSVTHSPYQLSAPSDPLLVSVTGNPSNSWLSPTEPSSETGNPRHLHVLIGTSVVIILFILLLFFLLHRWCCNKKNAVVMDQEPAGNRTVNREDSDEQDPQEVTYAQLNHCVFTQRKITHPSQRPKTPPTDIIVYTELPNAEP

SEQ ID NO: 45 - DNA, 1609 bp, Homo sapiens
gtcgagccgagtcactgcgtcctggcagcagaagctgcaccatgtccatgtcacccacggtcatcatcctggcatgtcttgggttcttcttggaccagagtgtgtgggcacacgtgggtggtcaggacaagcccttctgctctgcctggcccagcgctgtggtgcctcaaggaggacacgtgactcttcggtgtcactatcgtcgtgggtttaacatcttcacgctgtacaagaaagatggggtccctgtccctgagctctacaacagaatattctggaacagtttcctcattagccctgtgaccccagcacacgcagggacctacagatgtcgaggttttcacccgcactcccccactgagtggtcggcacccagcaaccccctggtgatcatggtcacaggtctatatgagaaaccttcgcttacagcccggccgggccccacggttcgcacaggagagaacgtgaccttgtcctgcagctcccagagctcctttgacatctaccatctatccagggagggggaagcccatgaacttaggctccctgcagtgcccagcatcaatggaacattccaggccgacttccctctgggtcctgccacccacggagagacctacagatgcttcggctctttccatggatctccctacgagtggtcagacgcgagtgacccactgcctgtttctgtcacaggaaacccttctagtagttggccttcacccactgaaccaagcttcaaaactggtatcgccagacacctgcatgctgtgattaggtactcagtggccatcatcctcttcaccatccttcccttctttctccttcatcgctggtgctccaaaaaaaaaaatgctgctgtaatgaaccaagagcctgcgggacacagaacagtgaacagggaggactctgatgaacaagaccctcaggaggtgacatacgcacagttggatcactgcattttcacacagagaaaaatcactggcccttctcagaggagcaagagaccctcaacagataccagcgtgtgtatagaacttccaaatgctgagcccagagcgttatctcctgcccatgagcaccacagtcaggccttgatgggatcttctagggagacaacagccctgtctcaaacccagcttgccagctctaatgtaccagcagctggaatctgaaggcgtgagtctccatcttagagcatcactcttcctcacaccacaaatctggtgcctgtctcttgcttaccaatgtctaaggtccccactgcctgctgcagagaaaacacactcctttgcttagcccacaattctctatttcacttgacccctgcccacctctccaacctaactggcttacttcctagtctacttgaggctgcaatcacactgaggaactcacaattccaaacatacaagaggctctctattaacacggcacttagacacgtgctgttccaccttccctcgtgctgttccacctttcctcagactatttttcagccttctggcatcagcaaaccttataaaatttttttgatttcagtgtagttctctcctcttcaaataaacatgtctgccttcaaaaaaaaaaaaaaaaaaaaaaaaaaaaa

SEQ ID NO: 46 - protein, 377 aa, Homo sapiens
MSMSPTVIILACLGFFLDQSVWAHVGGQDKPFCSAWPSAVVPQGGHVTLRCHYRRGFNIFTLYKKDGVPVPELYNRIFWNSFLISPVTPAHAGTYRCRGFHPHSPTEWSAPSNPLVIMVTGLYEKPSLTARPGPTVRTGENVTLSCSSQSSFDIYHLSREGEAHELRLPAVPSINGTFQADFPLGPATHGETYRCFGSFHGSPYEWSDASDPLPVSVTGNPSSSWPSPTEPSFKTGIARHLHAVIRYSVAIILFTILPFFLLHRWCSKKKNAAVMNQEPAGHRTVNREDSDEQDPQEVTYAQLDHCIFTQRKITGPSQRSKRPSTDTSVCIELPNAEPRALSPAHEHHSQALMGSSRETTALSQTQLASSNVPAAGI

SEQ ID NO: 47 - DNA, 681 bp, Homo sapiens
atgtcgctcatggtcatcatcatggcgtgtgttgggttcttcttgctgcagggggcctggccacaggagggagtccacagaaaaccttccttcctggccctcccaggtcacctggtgaaatcagaagagacagtcatcctgcaatgttggtcggatgtcatgtttgagcacttccttctgcacagagaggggaagtttaacaacactttgcacctcattggagagcaccatgatggggtttccaaggccaacttctccattggtcccatgatgcctgtccttgcaggaacctacagatgctacggttctgttcctcactccccctatcagttgtcagctcccagtgaccctctggacatggtgatcataggtctatatgagaaaccttctctctcagcccagccgggccccacggttcaggcaggagagaatgtgaccttgtcctgcagctccatctatccagggagggggaggcccatgaacgtaggctccctgcagtgcgcagcatcaacggaacattccaggccgacttttctctgggccctgccacccacggagggacctacagatgcttcggctctttccgtgacgctccctacgagtggtcaaactcgagtgatccactgcttgtttccgtcacaggtaaccccagacacctacatgttctgattgggaccaatc

SEQ ID NO: 48 - protein, 222 aa, Homo sapiens
MSLMVIIMACVGFFLLQGAWPQEGVHRKPSFLALPGHLVKSEETVILQCWSDVMFEHFLLHREGKFNNTLHLIGEHHDGVSKANFSIGPMMPVLAGTYRCYGSVPHSPYQLSAPSDPLDMVIIGLYEKPSLSAQPGPTVQAGENVTLSCSSIYPGRGRPMNVGSLQCAASTEHSRPTFLWALPPTEGPTDASALSVTLPTSGQTRVIHCLFPSQVTPDTYMF

SEQ ID NO: 49 - DNA, 1695 bp, Homo sapiens
gtctgcaccggcagcaccatgtcgctcatggtcgtcagcatggcgtgtgttgggttcttcttgctggaggggccctggccacatgtgggtggtcaggacaagcccttcctctctgcctggcccggcactgtggtgtctgaaggacaacatgtgactcttcagtgtcgctctcatcttgggtttaacgaattcagtctgtccaaagaagacgggatgcctgtccctgagctctacaacagaatattccggaacagctttctcatgggccctgtgaccccagcacatgcagggacctacagatgttgcagttcacacccacactcccccactgggtggtcggcacccagcaaccctgtggtgatcatggtcacgggagtccacagaaaaccttccctcctggcccacccaggtcccctggtgaaatcgggagagacggtcatcctgcaatgttggtcagatgtcaggtttgagcgcttccttctgcacagagaggggatcactgaggaccccttgcgcctcgttggacagctccacgatgcgggttcccaggtcaactattccatgggtcccatgacacctgcccttgcagggacctacagatgctttggttctgtcactcacttaccctatgagttgtcggctcccagtgaccctctggacatcgtggtcgtaggtctatatgggaaaccttctctctcagcccagccgggccccacggttcaggcaggagagaatgtgaccttgtcctgcagctcccggagcttgtttgacatttaccatctatccagggaggcagaggccggtgaacttaggctcactgcggtgctgagggtcaatggaacattccaggccaacttccctctgggccctgtgacccacggagggaactacagatgcttcggctctttccgtgccctgccccacgcgtggtcagacccgagtgacccactgcccgtttctgtcacaggtaactccagatacctgcacgctctgattgggacctcagtggtcatcatcccctttgctatcctcctcttctttctccttcatcgctggtgtgccaacaaaaagaatgctgttgtaatggaccaagagcctgcagggaacagaacagtgaacagggaggactctgatgaacaagaccctcaggaggtgacatacgcacagttgaatcactgcgttttcacacagagaaaaatcactcgcccttctcagaggcccaagacacccccaacagataccagcgtgtaacacggaacttccaaatgctgagcgcagatccaaagttgtcttctgtccaccagcaccacagtcaggccttgatgggatcttctagggagacaatagccctgtctcaaaaccgggttgccagctcccatgtaccagcagctggaatctgaaggcgtgagtctgcatcttagggcatcgctcttcctcacaccacgagtctgaacatgcctctctcttgcttacaaatgtctaaggtccccactgcctgctggagagaaaacacactcctttgcttagcccacaattctccatttcacttgacccctgcccacctctccaacctaactggcttacttcctagtctacttgaggctgcgatcacactgaggaactcacaattccaaacatataagaggctccctcttaacacggcacttagatacatgctattccacctttcctcag

SEQ ID NO: 50 - protein, 410 aa, Homo sapiens
MSLMVVSMACVGFFLLEGPWPHVGGQDKPFLSAWPGTVVSEGQHVTLQCRSHLGFNEFSLSKEDGMPVPELYNRIFRNSFLMGPVTPAHAGTYRCCSSHPHSPTGWSAPSNPVVIMVTGVHRKPSLLAHPGPLVKSGETVILQCWSDVRFERFLLHREGITEDPLRLVGQLHDAGSQVNYSMGPMTPALAGTYRCFGSVTHLPYELSAPSDPLDIVVVGLYGKPSLSAQPGPTVQAGENVTLSCSSRSLFDIYHLSREAEAGELRLTAVLRVNGTFQANFPLGPVTHGGNYRCFGSFRALPHAWSDPSDPLPVSVTGNSRYLHALIGTSVVIIPFAILLFFLLHRWCANKKNAVVMDQEPAGNRTVNREDSDEQDPQEVTYAQLNHCVFTQRKITRPSQRPKTPPTDTSV

SEQ ID NO: 51 - DNA, 1596 bp, Homo sapiens
ctgtgcgctgctgagctgagctggggcgcggccgcctgtctgcaccggcagcaccatgtcgctcatggtcatcagcatggcgtgtgttgggttcttcttgctgcagggggcctggacacatgagggtggtcaggacaagcccttgctgtctgcctggcccagcgctgtggtgcctcgaggaggacatgtgactcttctgtgtcgctctcgtcttgggtttaccatcttcagtctgtacaaagaagatggggtgcctgtccctgagctctacaacaaaatattctggaagagcatcctcatgggccctgtgacccctgcacacgcagggacctacagatgtcggggttcacacccacgctcccccattgagtggtcagcacccagcaaccccctggtgatcgtggtcacaggtctatttgggaaaccttcactctcagcccagccgggccccacggttcgcacaggagagaacgtgaccttgtcctgcagctccaggagctcatttgacatgtaccatctatccagggaggggagggcccatgaacctaggctccctgcagtgcccagcgtcaatggaacattccaggctgactttcctctgggccctgccacccacggagggacctacacatgcttcggctctctccatgactcaccctatgagtggtcagacccgagtgacccactgcttgtttctgtcacaggaaactcttcaagtagttcatcttcacccactgaaccaagctccaaaactggtatccgcagacacctgcacattctgattgggacctcagtggctatcatcctcttcatcatcctcttcttctttctccttcattgctgctgctccaacaaaaagaatgctgctgtaatggaccaagagcctgccggggacagaacagtgaacagggaggactctgatgatcaagaccctcaggaggtgacatatgcacagttggatcactgcgttttcacacagacaaaaatcacttccccttctcagaggcccaagacacctccaacagataccaccatgtacatggaacttccaaatgctaagccaagatcattgtctcctgcccataagcaccacagtcaggccttgaggggatcttctagggagacaacagccctgtctcaaaaccgggttgctagctcccatgtaccagcagctggaatctgaaggcatcagtcttcatcttaggggatcgctcttcctcacaccacaaatctgaacatgcctctctcttgcttacaaatgtctaaggtccccactgcctgctggagagaagacacactcctttgcttagcccacaattctctatttcacttgacccctgcccacctctccaactgaactggcttacttcctagtctacttgaggctgcaatcacactgaggaactcacaattccagacatacaagaggctccctcttaacatggcactgagacacgtgctgttccaccttccctcatgctgtttcacctttcctcagactattttccagccttctgtcagtcagcagtgaaacttataaaattttttgtgatttcaatgtagctgtctccttttcaaataaacatgtctgccctc

SEQ ID NO: 52 - protein, 375 aa, Homo sapiens
MSLMVISMACVGFFLLQGAWTHEGGQDKPLLSAWPSAVVPRGGHVTLLCRSRLGFTIFSLYKEDGVPVPELYNKIFWKSILMGPVTPAHAGTYRCRGSHPRSPIEWSAPSNPLVIVVTGLFGKPSLSAQPGPTVRTGENVTLSCSSRSSFDMYHLSREGRAHEPRLPAVPSVNGTFQADFPLGPATHGGTYTCFGSLHDSPYEWSDPSDPLLVSVTGNSSSSSSSPTEPSSKTGIRRHLHILIGTSVAIILFIILFFFLLHCCCSNKKNAAVMDQEPAGDRTVNREDSDDQDPQEVTYAQLDHCVFTQTKITSPSQRPKTPPTDTTMYMELPNAKPRSLSPAHKHHSQALRGSSRETTALSQNRVASSHVPAAGI

SEQ ID NO: 53 - DNA, 1587 bp, Homo sapiens
actgtctgcacagacagcaccatgtcgctcatggtcgtcagcatggcgtgtgttgggttcttcttgctgcagggggcctggccacatgagggagtccacagaaaaccttccctccgggcccacccaggtcccctggtgaaatcagaagagacagtcatcctgcaatgttggtcagatgtcaggtttgagcacttccttctgcacagagaagggaagtttaaggacactttgcgcctcattggagagcaccatgatggggtctccaaggccaacttctccatcggtcccatgatgcaagaccttgcagggacctacagatgctacggttctgttactcactccccctatcagttgtcagctcccagtgaccctctggacatcgtcatcacaggtctatatgagaaaccttctctctcagcccagccgggccccacggttctggcaggagagagcgtgaccttgtcctgcagctcccggagctcctatgacatgtaccatctatccagggagggggaggcccatgaacgtaggttctctgcagggcccaaggtcaacggaacattccaggccgactttcctctgggccctgccacccacggaggaacctacagatgcttcggctctttccgtgactctccatacgagtggtcaaactcgagtgacccactgcttgtttctgtcacaggaaacccttcaaatagttggccttcacccactgaaccaagctccgaaaccggtaaccccatacacctgcatgttctgattgggacctcagtggtcatcatcctcttcatcctcctcctcttctttctccttcatcgctggtgctgcaacaaaaaaaatgctgttgtaatggaccaagagcctgcagggaacagaacagtgaacagggaggactctgatgaacaagaccctcaggaggtgacatatgcacagttgaatcactgcgttttcacacagagaaaaatcactcacccttctcagaggcccaagacacccccaacagatatcatcgtgtacacggaacttccaaatgctgagccctgatccaaagttgtctcctgcccatgagcaccacagtcaggccttgaggggatcttctagggagacaacagccctgtctcaaaactgggttgccagctccaatgtaccagcagctggaatctgaaggcgtgagtctgcatcttagggcatcgctcttcctcacaccacaaatctgaacgtgcctctctcttgcttacaaatgtctaaggtccccactgcctgctggagagaaaacacactcctttgcttagcccacaattctccatttcacttgacccctgcccacctctccaacctaactggcttacttcctagtctacttgaggctgcaatcacactgaggaactcacaattccaaacatacaagaggctccctcttaacacggcacttagacacgtgctgttccaccttccctcatgctgttccacctcccctcagactagctttcagccttctgtcagcagtaaaacttatatattttttaaaataatttcaatgtagttttccctccttcaaataaacatgtctgccctcaaaaaaaa

SEQ ID NO: 54 - protein, 341 aa, Homo sapiens
MSLMVVSMACVGFFLLQGAWPHEGVHRKPSLRAHPGPLVKSEETVILQCWSDVRFEHFLLHREGKFKDTLRLIGEHHDGVSKANFSIGPMMQDLAGTYRCYGSVTHSPYQLSAPSDPLDIVITGLYEKPSLSAQPGPTVLAGESVTLSCSSRSSYDMYHLSREGEAHERRFSAGPKVNGTFQADFPLGPATHGGTYRCFGSFRDSPYEWSNSSDPLLVSVTGNPSNSWPSPTEPSSETGNPIHLHVLIGTSVVIILFILLLFFLLHRWCCNKKNAVVMDQEPAGNRTVNREDSDEQDPQEVTYAQLNHCVFTQRKITHPSQRPKTPPTDIIVYTELPNAEP

SEQ ID NO: 55 - DNA, 1457 bp, Homo sapiens
ccggcagcaccatgttgctcatggtcatcagcatggcgtgtgttgcgttcttcttgctgcagggggcctggccacatgagggattccgcagaaaaccttccctcctggcccacccaggtcccctggtgaaatcagaagagacagtcatcctgcaatgttggtcagatgtcatgtttgagcacttccttctgcacagagaggggacgtttaaccacactttgcgcctcattggagagcacattgatggggtctccaagggcaacttctccatcggtcgcatgacacaagacctggcagggacctacagatgctacggttctgttactcactccccctatcagttgtcagcgcccagtgaccctctggacatcgtgatcacaggtctatatgagaaaccttctctcccagcccagccgggccccacggttctggcaggagagagcgtgaccttgtcctgcagctcccggagctcctatgacatgtaccatctatccagggaaggggaggcccatgaacgtaggctccctgcagggcccaaggtcaacagaacattccaggccgactctcctctggaccctgccacccacggaggggcctacagatgcttcggctctttccgtgactctccatacgagtggtcaaagtcaagtgacccactgcttgtttctgtcacaggaaactcttcaaatagttggccttcacccactgaaccaagctccgaaaccggtaaccccagacacctacacgttctgattgggacctcagtggtcaaactccctttcaccatcctcctcttctttctccttcatcgctggtgctccaacaaaaaaaatgcatctgtaatggaccaagggcctgcggggaacagaacagtgaacagggaggattctgatgaacaggaccatcaggaggtgtcatacgcataattggatcactgtgttttcacacagagaaaaatcactcccccttctcagaggcccaagacacccccaacagataccagcatgtacatagaacttccaaatgctgagtccagatccaaagctgtcttctgtccacgagcaccacagtcaggccttgaggggatcttctagggagacaacagccctgtctcaaaaccgggttgccagctcccatgtacctgcggctggaatctgaaggcatcagtcttcatcttaggggatcgctcttcctcaaaccacgaatctgaacatgcctctctcctgcttacaaatgtctaaggtccccactgcctgctggagagaaaacacactcctttgcttagcccacaattctccatttcacttgacccctgcccacctctccaacctaactggcttacttcctggtctacttgaggctgcaatcacactgaggaactcacaattccaaacatacaagaggctccctcttaacacagcacttagacacgtgctgttccaccttccctcatgctg

SEQ ID NO: 56 - protein, 304 aa, Homo sapiens
MLLMVISMACVAFFLLQGAWPHEGFRRKPSLLAHPGPLVKSEETVILQCWSDVMFEHFLLHREGTFNHTLRLIGEHIDGVSKGNFSIGRMTQDLAGTYRCYGSVTHSPYQLSAPSDPLDIVITGLYEKPSLPAQPGPTVLAGESVTLSCSSRSSYDMYHLSREGEAHERRLPAGPKVNRTFQADSPLDPATHGGAYRCFGSFRDSPYEWSKSSDPLLVSVTGNSSNSWPSPTEPSSETGNPRHLHVLIGTSVVKLPFTILLFFLLHRWCSNKKNASVMDQGPAGNRTVNREDSDEQDHQEVSYA

SEQ ID NO: 57 - DNA, 1101 bp, Homo sapiens
caccggcagcaccatgtcgctcacggtcgtcagcatggcgtgtgttgggttcttcttgctgcagggggcctggccacatgagggagtccacagaaaaccttccctcctggcccacccaggtcgcctggtgaaatcagaagagacagtcatcctgcaatgttggtcagatgtcatgtttgaacacttccttctgcacagagaggggatgtttaacgacactttgcgcctcattggagaacaccatgatggggtctccaaggccaacttctccatcagtcgcatgaagcaagacctggcagggacctacagatgctacggttctgttactcactccccctatcagttgtcagctcccagtgaccctctggacatcgtgatcataggtctatatgagaaaccttctctctcagcccagccgggccccacggttctggcaggagagaatgtgaccttgtcctgcagctcccggagctcctatgacatgtaccatctatccagggaaggggaggcccatgaacgtaggctccctgcagggaccaaggtcaacggaacattccaggccaactttcctctgggccctgccacccatggagggacctacagatgcttcggctctttccgtgactctccatacgagtggtcaaagtcaagtgacccactgcttgtttctgtcacaggaaacccttcaaatagttggccttcacccactgaaccaagctccgaaaccggtaaccccagacacctacatgttctgattgggacctcagtggtcaaaatccctttcaccatcctcctcttctttctccttcatcgctggtgctccgacaaaaaaaatgctgctgtaatggaccaagagcctgcagggaacagaacagtgaacagcgaggattctgatgaacaagaccatcaggaggtgtcatacgcataattggatcactgtgttttcacacagagaaaaatcactcgcccttctgagaggcccaagacacccccaacagataccagcatgtacatagaacttccaaatgctgagcccagatccaaagttgtcttctgtccacgagcaccacagtcaggccttgaggggatcttctagggaga

SEQ ID NO: 58 - protein, 304 aa, Homo sapiens
MSLTVVSMACVGFFLLQGAWPHEGVHRKPSLLAHPGRLVKSEETVILQCWSDVMFEHFLLHREGMFNDTLRLIGEHHDGVSKANFSISRMKQDLAGTYRCYGSVTHSPYQLSAPSDPLDIVIIGLYEKPSLSAQPGPTVLAGENVTLSCSSRSSYDMYHLSREGEAHERRLPAGTKVNGTFQANFPLGPATHGGTYRCFGSFRDSPYEWSKSSDPLLVSVTGNPSNSWPSPTEPSSETGNPRHLHVLIGTSVVKIPFTILLFFLLHRWCSDKKNAAVMDQEPAGNRTVNSEDSDEQDHQEVSYA

SEQ ID NO: 59 - DNA, 1572 bp, Homo sapiens
gcacagacagcaccatgtcgctcatggtcgtcagcatggcgtgtgttgggttcttcttgctgcagggggcctggccacatgagggagtccacagaaaaccttccctcctggcccacccaggtcgcctggtgaaatcagaagagacagtcatcctgcaatgttggtcagatgtcaggtttgagcacttccttctgcacagagaagggaagtttaaggacactttgcacctcattggagagcaccatgatggggtctccaaagccaacttctccatcggtcccatgatgcaagaccttgcagggacctacagatgctacggttctgttactcactccccctatcagttgtcagctcccagtgaccctctggacatcgtcatcacaggtctatatgagaaaccttctctctcagcccagccgggccccacggttctggcaggagagagcgtgaccttgtcctgcagctcccggagctcctatgacatgtaccatctatccagggagggggaggcccatgaatgtaggttctctgcagggcccaaggtcaacggaacattccaggccgactttcctctgggccctgccacccacggaggaacctacagatgcttcggctctttccgtgactctccatacgagtggtcaaactcgagtgacccactgcttgtttctgtcataggaaacccttcaaatagttggccttcacccactgaaccaagctctaaaaccggtaacccccgacacctgcacattctgattgggacctcagtggtcatcatcctcttcatcctcctcttctttctccttcatcgctggtgctccaacaaaaaaaatgctgcggtaatggaccaagagtctgcagggaacagaacagcgaatagcgaggactctgatgaacaagaccctcaggaggtgacatacacacagttgaatcactgcgttttcacacagagaaaaatcactcgcccttctcagaggcccaagacacccccaacagatatcatcgtgtacgcggaacttccaaatgctgagtccagatccaaagttgtctcctgcccatgagcaccacagtcaggccttgagggcgtcttctagggagacaacagccctgtctcaaaaccgggttgccagctcccatgtaccagcagctggaatctgaaggcatgagtctgcatcttagggcatcgctcttcctcacaccacaaatctgaatgtgcctctcacttgcttacaaatgtctaaggtccccactgcctgctggagaaaaaacacactcctttgcttagcccacagttctccatttcacttgacccctgcccacctctccaacctaactggcttacttcctagtctacttgaggctgcaatcacactgaggaactcacaattccaaacatacaagaggctccctcttaacgcagcacttagacacgtgttgttccaccttccctcatgctgttccacctcccctcagactagctttcagtcttctgtcagcagtaaaacttatatattttttaaaataacttcaatgtagttttccatccttcaaataaacatgtctgcccccatg

SEQ ID NO: 60 - protein, 348 aa, Homo sapiens
MSLMVVSMACVGFFLLQGAWPHEGVHRKPSLLAHPGRLVKSEETVILQCWSDVRFEHFLLHREGKFKDTLHLIGEHHDGVSKANFSIGPMMQDLAGTYRCYGSVTHSPYQLSAPSDPLDIVITGLYEKPSLSAQPGPTVLAGESVTLSCSSRSSYDMYHLSREGEAHECRFSAGPKVNGTFQADFPLGPATHGGTYRCFGSFRDSPYEWSNSSDPLLVSVIGNPSNSWPSPTEPSSKTGNPRHLHILIGTSVVIILFILLFFLLHRWCSNKKNAAVMDQESAGNRTANSEDSDEQDPQEVTYTQLNHCVFTQRKITRPSQRPKTPPTDIIVYAELPNAESRSKVVSCP

SEQ ID NO: 61 - DNA, 1593 bp, Homo sapiens
cgcgtgggcgtgcctgtctgctccggcagcaccatgtcgctcttgttcgtcagcatggcgtgtgttgggttcttcttgctgcagggggcctggccacatgagggagtccacagaaaaccttccctcctggcccacccaggtcccctggtgaaatcagaagagacagtcatcctgcaatgttggtcagatgtcatgtttgaacacttccttctgcacagagaggggatgtttaacgacactttgcgcctcattggagaacaccatgatggggtctccaaggccaacttctccatcagtcgcatgacgcaagacctggcagggacctacagatgctacggttctgttactcactccccctatcaggtgtcagctcccagtgaccctctggacatcgtgatcataggtctatatgagaaaccttctctctcagcccagccgggccccacggttctggcaggagagaatgtgaccttgtcctgcagctcccggagctcctatgacatgtaccatctatccagggaaggggaggcccatgaacgtaggctccctgcagggcccaaggtcaacggaacattccaggctgactttcctctgggccctgccacccacggagggacctacagatgcttcggctctttccatgactctccatacgagtggtcaaagtcaagtgacccactgcttgtttctgtcacaggaaacccttcaaatagttggccttcacccactgaaccaagctccaaaaccggtaacccccgacacctgcacattctgattgggacctcagtggtcatcatcctcttcatcctcctcttctttctccttcatcgctggtgctccaacaaaaaaaatgctgcggtaatggaccaagagtctgcaggaaacagaacagcgaatagcgaggactctgatgaacaagaccctcaggaggtgacatacacacagttgaatcactgcgttttcacacagagaaaaatcactcgcccttctcagaggcccaagacacccccaacagatatcatcgtgtacacggaacttccaaatgctgagtccagatccaaagttgtctcctgcccatgagcaccacagtcaggccttgagggcgtcttctagggagacaacagccctgtctcaaaaccgggttgccagctcccatgtaccagcagctggaatctgaaggcatgagtctgcatcttagggcatcgatcttcctcacaccacaaatctgaatgtgcctctcacttgcttacaaatgtctaaggtccccactgcctgctggagaaaaaacacactcctttgcttagcccacagttctccatttcacttgacccctgcccacctctccaacctaactggcttacttcctagtctacttgaggctgcaatcacactgaggaactcacaattccaaacatacaagaggctccctcttaacgcagcacttagacacgtgttgttccaccttccctcatgctgttccacctcccctcagactagctttcagtcttctgtcagcagtaaaacttatatattttttaaaataacttcaatgtagttttccatccttcaaataaacatgtctgcccccatggt

SEQ ID NO: 62 - protein, 348 aa, Homo sapiens
MSLLFVSMACVGFFLLQGAWPHEGVHRKPSLLAHPGPLVKSEETVILQCWSDVMFEHFLLHREGMFNDTLRLIGEHHDGVSKANFSISRMTQDLAGTYRCYGSVTHSPYQVSAPSDPLDIVIIGLYEKPSLSAQPGPTVLAGENVTLSCSSRSSYDMYHLSREGEAHERRLPAGPKVNGTFQADFPLGPATHGGTYRCFGSFHDSPYEWSKSSDPLLVSVTGNPSNSWPSPTEPSSKTGNPRHLHILIGTSVVIILFILLFFLLHRWCSNKKNAAVMDQESAGNRTANSEDSDEQDPQEVTYTQLNHCVFTQRKITRPSQRPKTPPTDIIVYTELPNAESRSKVVSCP

SEQ ID NO: 63 - DNA, 1865 bp, Homo sapiens
ccacgcgtccggcaccggcagcaccatgttgctcatggtcgtcagcatggcgtgtgttgggttcttcttggtccagagggccggtccacacgtgggtggtcaggacaagcccttcctgtctgcctggcccagcgctgtggtgcctcgaggaggacacgtgactcttcggtgtcactatcgtcataggtttaacaatttcatgctatacaaagaagacagaatccacgttcccatcttccatggcagattattccaggagagcttcaacatgagccctgtgaccacagcacatgcagggaactacacatgtcggggttcacacccacactcccccactgggtggtcggcacccagcaaccccgtggtgatcatggtcacaggaaaccacagaaaaccttccctcctggcccacccaggtcccctggtgaaatcaggagagagagtcatcctgcaatgttggtcagatatcatgtttgagcacttctttctgcacaaagaggggatctctaaggacccctcacgcctcgttggacagatccatgatggggtctccaaggccaatttctccatcggtcccatgatgcttgcccttgcagggacctacagatgctacggttctgttactcacaccccctatcagttgtcagctcccagtgatcccctggacatcgtggtcacaggtccatatgagaaaccttctctctcagcccagccgggccccaaggttcaggcaggagagagcgtgaccttgtcctgcagctcccggagctcctatgacatgtaccatctatccagggagcggggagcccatgaacgtaggctccctgcagtgcgcaaggtcaacagaacattccaggcagatttccctctgggccctgccacccacggagggacctacagatgcttcggctctttccgtcactctccctacgagtggtcagacccgagtgacccactgcttgtttctgtcacaggaaacccttcaagtagttggccttcacccacagaaccaagctccaaatctggtaaccccagacacctgcacattctgattgggacctcagtggtcatcatcctcttcatcctcctcctcttctttctccttcatctctggtgctccaacaaaaaaaatgctgctgtaatggaccaagagcctgcagggaacagaacagccaacagcgaggactctgatgaacaagaccctgaggaggtgacatacgcacagttggatcactgcgttttcacacagagaaaaatcactcgcccttctcagaggcccaagacaccccctacagataccatcttgtacacggaacttccaaatgctaagcccagatccaaagttgtctcctgcccatgagcaccacagtcaggccttgaggacgtcttctagggagacaacagccctgtctcaaaaccgagttgccagctcccatgtaccagcagctggaatctgaaggcgtgagtcttcatcttagggcatcgctcctcctcacgccacaaatctggtgcctctctcttgcttacaaatgtctaggtccccactgcctgctggaaagaaaacacactcctttgcttagcccacagttctccatttcacttgacccctgcccacctctccaacctaactggcttacttcctagtctacttgaggctgcaatcacactgaggaactcacaattccaaacatacaagaggctccctcttgacgtggcacttacccacgtgctgttccaccttccctcatgctgtttcacctttcttcggactattttccagccttctgtcagcagtgaaacttataaaattttttgtgatttcaatgtagctgtctcctcttcaaataaacatgtctgccctccaa

SEQ ID NO: 64 - protein, 444 aa, Homo sapiens
MLLMVVSMACVGFFLVQRAGPHVGGQDKPFLSAWPSAVVPRGGHVTLRCHYRHRFNNFMLYKEDRIHVPIFHGRLFQESFNMSPVTTAHAGNYTCRGSHPHSPTGWSAPSNPVVIMVTGNHRKPSLLAHPGPLVKSGERVILQCWSDIMFEHFFLHKEGISKDPSRLVGQIHDGVSKANFSIGPMMLALAGTYRCYGSVTHTPYQLSAPSDPLDIVVTGPYEKPSLSAQPGPKVQAGESVTLSCSSRSSYDMYHLSRERGAHERRLPAVRKVNRTFQADFPLGPATHGGTYRCFGSFRHSPYEWSDPSDPLLVSVTGNPSSSWPSPTEPSSKSGNPRHLHILIGTSVVIILFILLLFFLLHLWCSNKKNAAVMDQEPAGNRTANSEDSDEQDPEEVTYAQLDHCVFTQRKITRPSQRPKTPPTDTILYTELPNAKPRSKVVSCP

SEQ ID NO: 65 - DNA, 1317 bp, Homo sapiens
gctgagctgagctggggcgcggtcgcctgtctgcaccggcagcaccatgtcgctcatggtcatcatcatggcgtgtgttgggttcttcttgctgcagggggcctggccacaggagggagtccacagaaaaccttccttcctggccctcccaggtcacctggtgaaatcagaagagacagtcatcctgcaatgttggtcggatgtcatgtttgagcacttccttctgcacagagaggggaagtttaacaacactttgcacctcattggagagcaccatgatggggtttccaaggccaacttctccattggtcccatgatgcctgtccttgcaggaacctacagatgctacggttctgttcctcactccccctatcagttgtcagctcccagtgaccctctggacatggtgatcataggtctatatgagaaaccttctctctcagcccagccgggccccacggttcaggcaggagagaatgtgaccttgtcctgcagctcccggagctcctatgacatgtaccatctatccagggaaggggaggcccatgaacgtaggctccctgcagtgcgcagcatcaacggaacattccaggccgactttcctctgggccctgccacccacggagggacctacagatgcttcggctctttccgtgacgctccctacgagtggtcaaactcgagtgatccactgcttgtttccgtcacaggaaacccttcaaatagttggccttcacccactgaaccaagctccaaaaccggtaaccccagacacctacatgttctgattgggacctcagtggtcaaaatccctttcaccatcctcctcttctttctccttcatcgctggtgctccgacaaaaaaaatgctgctgtaatggaccaagagcctgcagggaacagaacagtgaacagcgaggattctgatgaacaagaccatcaggaggtgtcatacgcataattggatcactgtgttttcacacagagaaaaatcactcgcccttctgagaggcccaagacacccccaacagataccagcatgtacatagaacttccaaatgctgagcccagatccaaagttgtcttctgtccacgagcaccacagtcaggccttgaggggatcttctagggagacaacagccctgtctcaaaaccgggttgccagctcccatgtaccagcagctggaatctgaaggcatcagtcttcatcttagggcatcgctcttcctcacaccacgaatctgaacatgcctctctcttgcttacaaatgtctaaggtccccactgcctgctggagagaaaacacactcctttgct

SEQ ID NO: 66 - protein, 304 aa, Homo sapiens
MSLMVIIMACVGFFLLQGAWPQEGVHRKPSFLALPGHLVKSEETVILQCWSDVMFEHFLLHREGKFNNTLHLIGEHHDGVSKANFSIGPMMPVLAGTYRCYGSVPHSPYQLSAPSDPLDMVIIGLYEKPSLSAQPGPTVQAGENVTLSCSSRSSYDMYHLSREGEAHERRLPAVRSINGTFQADFPLGPATHGGTYRCFGSFRDAPYEWSNSSDPLLVSVTGNPSNSWPSPTEPSSKTGNPRHLHVLIGTSVVKIPFTILLFFLLHRWCSDKKNAAVMDQEPAGNRTVNSEDSDEQDHQEVSYA

SEQ ID NO: 67 - DNA, 1113 bp, Homo sapiens
ccggcagcaccatgtcgctcatggtcatcagcatggcatgtgttgggttcttctggctgcagggggcctggccacatgagggattccgcagaaaaccttccctcctggcccacccaggtcgcctggtgaaatcagaagagacagtcatcctgcaatgttggtcagatgtcatgtttgagcacttccttctgcacagagaggggacgtttaacgacactttgcgcctcattggagagcacattgatggggtctccaaggccaacttctccatcggtcgcatgaggcaagacctggcagggacctacagatgctacggttctgttcctcactccccctatcagttttcagctcccagtgaccctctggacatcgtgatcacaggtctatatgagaaaccttctctctcagcccagccgggccccacggttctggcaggagagagcgtgaccttgtcctgcagctcctggagctcctatgacatgtaccatctatccacggagggggaggcccatgaacgtaggttctctgcagggcccaaggtcaacggaacattccaggccgactttcctctgggccctgccacccaaggaggaacctacagatgcttcggctctttccatgactctccctacgagtggtcaaagtcaagtgacccactgcttgtttctgtcacaggaaacccttcaaatagttggccttcacccactgaaccaagctccaaaaccggtaaccccagacacctacacgttctgattgggacctcagtggtcaaactccctttcaccatcctcctcttctttctccttcatcgctggtgctccgacaaaaaaaatgcatctgtaatggaccaagggcctgcggggaacagaacagtgaacagggaggattctgacgaacaggaccatcaggaggtgtcatacgcataattggatcactgtgttttcacacagagaaaaatcactcccccttctcagaggcccaagacacccccaacagatagcagcatgtacatagaacttccaaatgctgagtccagatccaaagctgtcttctgtccacgagcaccacagtcaggccttgaggggatcttctagggagacaacagccctgtct

SEQ ID NO: 68 - protein, 304 aa, Homo sapiens
MSLMVISMACVGFFWLQGAWPHEGFRRKPSLLAHPGRLVKSEETVILQCWSDVMFEHFLLHREGTFNDTLRLIGEHIDGVSKANFSIGRMRQDLAGTYRCYGSVPHSPYQFSAPSDPLDIVITGLYEKPSLSAQPGPTVLAGESVTLSCSSWSSYDMYHLSTEGEAHERRFSAGPKVNGTFQADFPLGPATQGGTYRCFGSFHDSPYEWSKSSDPLLVSVTGNPSNSWPSPTEPSSKTGNPRHLHVLIGTSVVKLPFTILLFFLLHRWCSDKKNASVMDQGPAGNRTVNREDSDEQDHQEVSYA

SEQ ID NO: 69 - DNA, 1557 bp, Homo sapiens
tgtctgcacagacagcaccatgtcgctcatggtcgtcagcatggcgtgtgttgggttcttcttgctgcagggggcctggccacatgagggagtccacagaaaaccttccctcctggcccacccaggtcccctggtgaaatcagaagagacagtcatcctgcaatgttggtcagatgtcaggtttgagcacttccttctgcacagagaggggaagtataaggacactttgcacctcattggagagcaccatgatggggtctccaaggccaacttctccatcggtcccatgatgcaagaccttgcagggacctacagatgctacggttctgttactcactccccctatcagttgtcagctcccagtgaccctctggacatcgtcatcacaggtctatatgagaaaccttctctctcagcccagccgggccccacggttttggcaggagagagcgtgaccttgtcctgcagctcccggagctcctatgacatgtaccatctatccagggagggggaggcccatgaacgtaggttctctgcagggcccaaggtcaacggaacattccaggccgactttcctctgggccctgccacccacggaggaacctacagatgcttcggctctttccgtgactctccctatgagtggtcaaactcgagtgacccactgcttgtttctgtcacaggaaacccttcaaatagttggccttcacccactgaaccaagctccaaaaccggtaaccccagacacctgcatgttctgattgggacctcagtggtcaaaatccctttcaccatcctcctcttctttctccttcatcgctggtgctccaacaaaaaaaatgctgctgtaatggaccaagagcctgcagggaacagaacagtgaacagcgaggattctgatgaacaagaccatcaggaggtgtcatacgcataattggatcactgtgttttcacacagagagaaatcactcgcccttctgagaggcccaagacacccccaacagataccagcatgtacatagaacttccaaatgctgagcccagatccaaagttgtcttctgtccacgagcaccacagtcaggccttgaggggatcttctagggagacaacagccctgtctcaaaaccgggttgccagctcccatgtaccagcagctggaatctgaaggcatcagtcttcatcttagggcatcgctcttcctcacaccacgaatctgaacatgcctctctcttgcttacaaatgtctaaggtccccactgcctgctggagagaaaacacactcctttgcttagcccacaattctccatttcacttgacccctgcccacctctccaacctaactagcttacttcctagtctacctgaggctgcaatcacactgaggaactcacaattccaaacatacaagaggctccctcttaacacagcacttagacacgtgctgttccacctcccttcagactatctttcagccttctgccagcagtaaaacttataaattttttaaataatttcaatgtagttttcccgccttcaaataaacatgtctgccctca

SEQ ID NO: 70 - protein, 304 aa, Homo sapiens
MSLMVVSMACVGFFLLQGAWPHEGVHRKPSLLAHPGPLVKSEETVILQCWSDVRFEHFLLHREGKYKDTLHLIGEHHDGVSKANFSIGPMMQDLAGTYRCYGSVTHSPYQLSAPSDPLDIVITGLYEKPSLSAQPGPTVLAGESVTLSCSSRSSYDMYHLSREGEAHERRFSAGPKVNGTFQADFPLGPATHGGTYRCFGSFRDSPYEWSNSSDPLLVSVTGNPSNSWPSPTEPSSKTGNPRHLHVLIGTSVVKIPFTILLFFLLHRWCSNKKNAAVMDQEPAGNRTVNSEDSDEQDHQEVSYA

SEQ ID NO: 71 - DNA, 1855 bp, Homo sapiens
ccatgtcgctcactgtcgtcagcatggcgtgcgttgggttcttcttgctgcagggggcctggccactcatgggtggtcaggacaaacccttcctgtctgcccggcccagcactgtggtgcctcgaggaggacacgtggctcttcagtgtcactatcgtcgtgggtttaacaatttcatgctgtacaaagaagacagaagccacgttcccatcttccacggcagaatattccaggagagcttcatcatgggccctgtgaccccagcacatgcagggacctacagatgtcggggttcacgcccacactccctcactgggtggtcggcacccagcaaccccctggtgatcatggtcacaggaaaccacagaaaaccttccctcctggcccacccagggcccctgctgaaatcaggagagacagtcatcctgcaatgttggtcagatgtcatgtttgagcacttctttctgcacagagatgggatctctgaggacccctcacgcctcgttggacagatccatgatggggtctccaaggccaacttctccatcggtcccttgatgcctgtccttgcaggaacctacagatgttatggttctgttcctcactccccctatcagttgtcagctcccagtgaccccctggacatcgtgatcacaggtctatatgagaaaccttctctctcagcccagccgggccccacggttcaggcaggagagaacgtgaccttgtcctgtagctcctggagctcctatgacatctaccatctgtccagggaaggggaggcccatgaacgtaggctccgtgcagtgcccaaggtcaacagaacattccaggcagactttcctctgggccctgccacccacggagggacctacagatgcttcggctctttccgtgccctgccctgcgtgtggtcaaactcaagtgacccactgcttgtttctgtcacaggaaacccttcaagtagttggccttcacccacagaaccaagctccaaatctggtatctgcagacacctgcatgttctgattgggacctcagtggtcatcttcctcttcatcctcctcctcttctttctcctttatcgctggtgctccaacaaaaagaatgctgctgtaatggaccaagagcctgcgggggacagaacagtgaataggcaggactctgatgaacaagaccctcaggaggtgacgtacgcacagttggatcactgcgttttcatacagagaaaaatcagtcgcccttctcagaggcccaagacacccctaacagataccagcgtgtacacggaacttccaaatgctgagcccagatccaaagttgtctcctgcccacgagcaccacagtcaggtcttgagggggttttctagggagacaacagccctgtctcaaaaccaggttgccagatccaatgaaccagcagctggaatctgaaggcatcagtctgcatcttaggggatcgctcttcctcacaccacgaatctgaacatgcctctctcttgcttacaaatgcctaaggtcgccactgcctgctgcagagaaaacacactcctttgcttagcccacaaggtatctatttcacttgacccctgcccacctctccaacctaactggcttacttcctagtcctacttgaggctgcaatcacactgaggaactcacaattccaaacatacaagaggctccctcttaacacggcacttacacacttgctgttccaccttccctcatgctgttccacctcccctcagactatctttcagccttctgtcatcagtaaaatttataaattttttttataacttcagtgtagctctctcctcttcaaataaacatgtctgccctcatggtttcg

SEQ ID NO: 72 - protein, 455 aa, Homo sapiens
MSLTVVSMACVGFFLLQGAWPLMGGQDKPFLSARPSTVVPRGGHVALQCHYRRGFNNFMLYKEDRSHVPIFHGRIFQESFIMGPVTPAHAGTYRCRGSRPHSLTGWSAPSNPLVIMVTGNHRKPSLLAHPGPLLKSGETVILQCWSDVMFEHFFLHRDGISEDPSRLVGQIHDGVSKANFSIGPLMPVLAGTYRCYGSVPHSPYQLSAPSDPLDIVITGLYEKPSLSAQPGPTVQAGENVTLSCSSWSSYDIYHLSREGEAHERRLRAVPKVNRTFQADFPLGPATHGGTYRCFGSFRALPCVWSNSSDPLLVSVTGNPSSSWPSPTEPSSKSGICRHLHVLIGTSVVIFLFILLLFFLLYRWCSNKKNAAVMDQEPAGDRTVNRQDSDEQDPQEVTYAQLDHCVFIQRKISRPSQRPKTPLTDTSVYTELPNAEPRSKVVSCPRAPQSGLEGVF

SEQ ID NO: 73 - DNA, 1740 bp, Homo sapiens
ccggcagcaccatgtcgctcatggtcgtcagcatggcgtgtgttgggttgttcttggtccagagggccggtccacacatgggtggtcaggacaagcccttcctgtctgcctggcccagcgctgtggtgcctcgcggaggacacgtgactcttcggtgtcactatcgtcataggtttaacaatttcatgctatacaaagaagacagaatccacgttcccatcttccatggcagaatattccaggagggcttcaacatgagccctgtgaccacagcacatgcagggaactacacatgtcggggttcacacccacactcccccactgggtggtcggcacccagcaaccccatggtgatcatggtcacaggaaaccacagaaaaccttccctcctggcccacccaggtcccctggtgaaatcaggagagagagtcatcctgcaatgttggtcagatatcatgtttgagcacttctttctgcacaaagagtggatctctaaggacccctcacgcctcgttggacagatccatgatggggtctccaaggccaatttctccatcggttccatgatgcgtgcccttgcagggacctacagatgctacggttctgttactcacaccccctatcagttgtcagctcccagtgatcccctggacatcgtggtcacaggtctatatgagaaaccttctctctcagcccagccgggccccaaggttcaggcaggagagagcgtgaccttgtcctgtagctcccggagctcctatgacatgtaccatctatccagggaggggggagcccatgaacgtaggctccctgcagtgcgcaaggtcaacagaacattccaggcagatttccctctgggccctgccacccacggagggacctacagatgcttcggctctttccgtcactctccctacgagtggtcagacccgagtgacccactgcttgtttctgtcacaggaaacccttcaagtagttggccttcacccacagaaccaagctccaaatctggtaacctcagacacctgcacattctgattgggacctcagtggtcaaaatccctttcaccatcctcctcttctttctccttcatcgctggtgctccaacaaaaaaaatgctgctgtaatggaccaagagcctgcagggaacagaagtgaacagcgaggattctgatgaacaagaccatcaggaggtgacatacgcataattggaacactgtgttttcacacagagaaaaatcactcgcccttctcagaggcccaagacacccccaacagataccagcatgtacatagaacttccaaatgctgagcccagatccaaagttgtcttctgtccacgagcaccacagtcaggccttgaggggatcttctagggagacaacagccctgtctcaaaactgggttgccagttcccatgtaccagcagctggaatctgaaggcatcagtcttcatcttagggcatcgctcttcctcacaccacaaatctgaatgtgcctctcacttgcttacaaatgtctaaggtccccactgcctgctggagaaaaaacacactcctttgcttagcccacagttctccatttcacttgacccctgcccacctctccaacctaactggcttacttcctagtctacttgaggctgcaatcacactgaggaactcacaattccacacatacaagaggctccgtcttaacgcagcacttagacacgtgctgttccaccttccctcatgctg

SEQ ID NO: 74 - protein, 387 aa, Homo sapiens
MSLMVVSMACVGLFLVQRAGPHMGGQDKPFLSAWPSAVVPRGGHVTLRCHYRHRFNNFMLYKEDRIHVPIFHGRIFQEGFNMSPVTTAHAGNYTCRGSHPHSPTGWSAPSNPMVIMVTGNHRKPSLLAHPGPLVKSGERVILQCWSDIMFEHFFLHKEWISKDPSRLVGQIHDGVSKANFSIGSMMRALAGTYRCYGSVTHTPYQLSAPSDPLDIVVTGLYEKPSLSAQPGPKVQAGESVTLSCSSRSSYDMYHLSREGGAHERRLPAVRKVNRTFQADFPLGPATHGGTYRCFGSFRHSPYEWSDPSDPLLVSVTGNPSSSWPSPTEPSSKSGNLRHLHILIGTSVVKIPFTILLFFLLHRWCSNKKNAAVMDQEPAGNRSEQRGF

SEQ ID NO: 75 - DNA, 4266 bp, Homo sapiens
tggggtgacatgagtgactccaaggaaccaagactgcagcagctgggcctcctggaggaggaacagctgagaggccttggattccgacagactcgaggatacaagagcttagcagggtgtcttggccatggtcccctggtgctgcaactcctctccttcacgctcttggctgggctccttgtccaagtgtccaaggtccccagctccataagtcaggaacaatccaggcaagacgcgatctaccagaacctgacccagcttaaagctgcagtgggtgagctctcagagaaatccaagctgcaggagatctaccaggagctgacccagctgaaggctgcagtgggtgagcttccagagaaatctaagctgcaggagatctaccaggagctgacccggctgaaggctgcagtgggtgagcttccagagaaatctaagctgcaggagatctaccaggagctgacctggctgaaggctgcagtgggtgagcttccagagaaatctaagatgcaggagatctaccaggagctgactcggctgaaggctgcagtgggtgagcttccagagaaatctaagcagcaggagatctaccaggagctgacccggctgaaggctgcagtgggtgagcttccagagaaatctaagcagcaggagatctaccaggagctgacccggctgaaggctgcagtgggtgagcttccagagaaatctaagcagcaggagatctaccaggagctgacccagctgaaggctgcagtggaacgcctgtgccacccctgtccctgggaatggacattcttccaaggaaactgttacttcatgtctaactcccagcggaactggcacgactccatcaccgcctgcaaagaagtgggggcccagctcgtcgtaatcaaaagtgctgaggagcagaacttcctacagctgcagtcttccagaagtaaccgcttcacctggatgggactttcagatctaaatcaggaaggcacgtggcaatgggtggacggctcacctctgttgcccagcttcaagcagtattggaacagaggagagcccaacaacgttggggaggaagactgcgcggaatttagtggcaatggctggaacgacgacaaatgtaatcttgccaaattctggatctgcaaaaagtccgcagcctcctgctccagggatgaagaacagtttctttctccagcccctgccaccccaaacccccctcctgcgtagcagaacttcacccccttttaagctacagttccttctctccatccttcgaccttcacaaaatctctgggactgttctttgtcagattcttcctcctttagaaggctgggtcccattctgtccttcttgtcatgcctccaatttcccctggtgtagagcttgtttttctggcccatccttggagctttatgagtgagctggtgtgggatgcctttgggggtggacttgtgttccaagaatccactctctcttccttttggagattaggatatttgggttgccatgtgtagctgctatgtcccctggggcgttatctcatacatgcaaacctaccatctgttcaacttccacctaccacctcctgcacccctttgatcggggacttactggttgcaagagctcattttgcaggctggaagcaccagggaattaattcccccagtctaccaatggcacccagagagggcatggaggctccacgcaaccccttccacccccacatcttcctttgtcttatacatggcttccatttggctgtttctaagttgtattctttattttattattattattactatttttcgagatggagtttcactcttgtcgctcaggctggagtgccatggcgcgatcttggctcactgcaacctctgcctcccgggttcaagtgattctcctgcctcagcctcacgagtagctggaattacaggcaggcgccaccaggcccggctaattttttgtatttttagtacagacggggtttctccgtgttggtcaggctggtcttgaactcccgacctcagatgatctgcccgcctcggcctcccaaaattgctgggattacaggtgtgagccaccgcgcctggcctattattttttgtaagaataaaacaggtttactgggatttgggactctgaacagttctgtctctactacctgatctcctcctaccacgactttgggatctagaggagctttggctccggctgtgacggctccggccgttctcactgcggctgcaccggcccccgctgcggtcactatttcttcctctgcttggtgaattgtgcctctcctggctctttgacatgtgctagtgagatttcttccttttcctttcggattccccatttcttttgtaggaatggtctggactagggttctccttccccgcagcctgtagtattcatcgtggtggcccatcctctctctccccttggagctcttgccaaaggaggagacaagcagaggtctctattggatttctcaacacctgaagaaagttgcagtgttttcctcttggacattgttgtatttcaaataaaccacaaatcatcattttccaccgagccactgggcagaattcacactgaagctgtcgtcctgcgtacataccatcgtccgttaaacagagaaagagctgcttggcattcttcttccgactggtactgaacatatatacttgcccctcaggtgaggttccaagttgcaactgaccttgaactgaatcactctccccacgttattttttaattactatttttttttaaagatggggtcttgctctgtcgccaggctggagtgcagtggcgcgatctaggctcactgcaacttccgcctcccgggttcaagcgattctcctgcctcagcctcccgagtagctgggactctactaaaagtacaaaaattagctggcgtgcaccaccgcgcccagctaattcttgtatttttggtagagacggggtttcaacatgttgaccaggatggtctcgatctcttgacctcgtgattcgcccgccgcgtcctcccaaagtgctgggattacaggcctgagccaccgcgcccagtctctccccacgttcttgaactcgggcagcacatcctcacagaaatctaggaactgttggtaggtttcttcctcgctgtactccaggcttgcttcggagtcatagtcatccctcctgcactgctcctttccaaacactgtaaacatgcttttaataagaagggtaggactggatgttgggaaatcatgtgaacatctatctccaaatctgcaagctcctgttttactgtagaagggacaattaactccatccttctccatgactctgaaatccaagggggggttccgggttttgccatgtggcgccattttccaactcattttcagcctgatccagcatcttctggacagcttccggtttttgtttcttctgtcgtttctgttcctcctcctctctctctttcctctgctgttcttcccattgttcctttaactttcgctcttgttcttgccgttttctagccacctcttccttttccttctttattctgaattcttcttgtgccttctgctctctcagcaaccactcctcatgtaatctttgcctctctcttccccatagcttttctagttgttgtttttcaataaaagtgtcctcctctttctgtgagagtcctgagtccctcagtggagcaagttcctgctggcgtttctttcgtttctccttcttcagggcggccctgtactttttgtggcttggtttctctggaaatgtcaccttttcgggcgcagccatcttgccggcaccgccccgcccctctagttgtatcctttataataaaatggtaaacattgtaaccgcagattcagcccaatctggttcaactttgtgtaataaaatggcgagttgtttttcagttgtcgtggacccccaggttgcaagttacataccctgggcatgtccagatgaacgaagcgtgcaaatccacgtggaacctaagtgctcagactgaggaacagggactgagttaagaagtggacaccacgtggcatgatccttgatccaatcagattgagccctggcgtgatccagtcagatcaagcctcctgaatcccctcattacaagatccaatcatatcatgcctcactaccctctgtatataaaatctgccccagcctccaacttggagagacagatttgggccagactcctgtgtccttgcttggctgccttgcaataaatttttctctctaca

SEQ ID NO: 76 - protein, 404 aa, Homo sapiens
MSDSKEPRLQQLGLLEEEQLRGLGFRQTRGYKSLAGCLGHGPLVLQLLSFTLLAGLLVQVSKVPSSISQEQSRQDAIYQNLTQLKAAVGELSEKSKLQEIYQELTQLKAAVGELPEKSKLQEIYQELTRLKAAVGELPEKSKLQEIYQELTWLKAAVGELPEKSKMQEIYQELTRLKAAVGELPEKSKQQEIYQELTRLKAAVGELPEKSKQQEIYQELTRLKAAVGELPEKSKQQEIYQELTQLKAAVERLCHPCPWEWTFFQGNCYFMSNSQRNWHDSITACKEVGAQLVVIKSAEEQNFLQLQSSRSNRFTWMGLSDLNQEGTWQWVDGSPLLPSFKQYWNRGEPNNVGEEDCAEFSGNGWNDDKCNLAKFWICKKSAASCSRDEEQFLSPAPATPNPPPA

SEQ ID NO: 77 - DNA, 18 bp, Homo sapiens
tagcaacctcaaacagac

SEQ ID NO: 78 - DNA, 20 bp, Homo sapiens
tcaccaccaacttcatccac

SEQ ID NO: 79 - DNA, 15 bp, Homo sapiens
tctcctcaggagtca

SEQ ID NO: 80 - DNA, 2562 bp, Homo sapiens
gggaggagaagcctgggtgccccccactgataagcaggctccacccagaggccagtcctgtgtgtctggggacaaggcgaaagagcagcagaagtgccccttctccaggatcaaggaactggggcggggggtgtttcctggaccccagtcctccgaatcagctcctagagtggaaccaggaaggattctggagccacagaagatagacagatggaaggtggggaccaaagtgaggaagagccgagggaacgcagccaggcaggtggaatgggaactctctggagccaagagagcactccagaagagaggctgcccgtggaagggagcaggccatgggcagtggccaggcgggtgctgacagctatcctgattttgggcctgctcctttgtttttctgtgcttttgttctacaacttccagaactgtggccctcgcccctgtgagacatctgtgtgtttggatctccgggatcattacctggcctctgggaacacaagtgtggccccctgcaccgacttcttcagctttgcctgtggaagggccaaagagaccaataattcttttcaggagcttgccacaaagaacaaaaaccgacttcggagaatactggaggtccagaattcctggcacccaggctctggggaggagaaagccttccagttctacaactcctgcatggatacacttgccattgaagctgcagggactggtcccctcagacaagttattgaggagcttggaggctggcgcatctctggtaaatggacttccttaaactttaaccgaacgctgagacttctgatgagtcagtatggccatttccctttcttcagagcctacctaggacctcatcctgcctctccacacacaccagtcatccagatagaccagccagagtttgatgttcccctcaagcaagatcaagaacagaagatctatgcccagatctttcgggaatacctgacttacctgaatcagctgggaaccttgctgggaggagacccaagcaaggtgcaagaacactcttccttgtcaatctccatcacttcacggctgttccagtttctgaggcccctggagcagcggcgggcacagggcaagctcttccagatggtcactatcgaccagctcaaggaaatggcccccgccatcgactggttgtcctgcttgcaagcgacattcacaccgatgtccctgagcccttctcagtccctcgtggtccatgacgtggaatatttgaaaaacatgtcacaactggtggaggagatgctgctaaagcagagggactttctgcagagccacatgatcttagggctggtggtgaccctttctccagccctggacagtcaattccaggaggcacgcagaaagctcagccagaaactgcgggaactgacagagcaaccacccatgcctgcccgcccacgatggatgaagtgcgtggaggagacaggcacgttcttcgagcccacgctggcggctttgtttgttcgtgaggcctttggcccgagcacccgaagtgctgccatgaaattattcactgcgatccgggatgccctcatcactcgcctcagaaaccttccctggatgaatgaggagacccagaacatggcccaggacaaggttgctcaactgcaggtggagatgggggcttcagaatgggccctgaagccagagctggcccgacaagaatacaacgatatacagcttggatcgagcttcctgcagtctgtcctgagctgtgtccggtccctccgagctagaattgtccagagcttcttgcagcctcacccccaacacaggtggaaggtgtccccttgggacgtcaatgcttactattcggtatctgaccatgtggtagtctttccagctggactcctccaacccccattcttccaccctggctatcccagagccgtgaactttggcgctgctggcagcatcatggcccacgagctgttgcacatcttctaccagctcttactgcctgggggctgcctcgcctgtgacaaccatgccctccaggaagctcacctgtgcctgaagcgccattatgctgcctttccattacctagcagaacctccttcaatgactccctcacattcttagagaatgctgcagacgttggggggctagccatcgcgctgcaggcatacagcaagaggctgttacggcaccatggggagactgtcctgcccagcctggacctcagcccccagcagatcttctttcgaagctatgcccaggtgatgtgtaggaagcccagcccccaggactctcacgacactcacagccctccacacctccgagtccacgggcccctcagcagcaccccagcctttgccaggtatttccgctgtgcacgtggtgctctcttgaacccctccagccgctgccagctctggtaacttggttaccaaagatgccacagcacagaaatatcgaccaacacctccctggtcacatccatggaatcagagcaagatttcctttctgcttctgttccaaaaataaaagctggcacttggcttccgcttgtctcttaaaaaaaaaaaaaaaaa

SEQ ID NO: 81 - protein, 732 aa, Homo sapiens
MEGGDQSEEEPRERSQAGGMGTLWSQESTPEERLPVEGSRPWAVARRVLTAILILGLLLCFSVLLFYNFQNCGPRPCETSVCLDLRDHYLASGNTSVAPCTDFFSFACGRAKETNNSFQELATKNKNRLRRILEVQNSWHPGSGEEKAFQFYNSCMDTLAIEAAGTGPLRQVIEELGGWRISGKWTSLNFNRTLRLLMSQYGHFPFFRAYLGPHPASPHTPVIQIDQPEFDVPLKQDQEQKIYAQIFREYLTYLNQLGTLLGGDPSKVQEHSSLSISITSRLFQFLRPLEQRRAQGKLFQMVTIDQLKEMAPAIDWLSCLQATFTPMSLSPSQSLVVHDVEYLKNMSQLVEEMLLKQRDFLQSHMILGLVVTLSPALDSQFQEARRKLSQKLRELTEQPPMPARPRWMKCVEETGTFFEPTLAALFVREAFGPSTRSAAMKLFTAIRDALITRLRNLPWMNEETQNMAQDKVAQLQVEMGASEWALKPELARQEYNDIQLGSSFLQSVLSCVRSLRARIVQSFLQPHPQHRWKVSPWDVNAYYSVSDHVVVFPAGLLQPPFFHPGYPRAVNFGAAGSIMAHELLHIFYQLLLPGGCLACDNHALQEAHLCLKRHYAAFPLPSRTSFNDSLTFLENAADVGGLAIALQAYSKRLLRHHGETVLPSLDLSPQQIFFRSYAQVMCRKPSPQDSHDTHSPPHLRVHGPLSSTPAFARYFRCARGALLNPSSRCQLW

SEQ ID NO: 82 - DNA, 2479 bp, Homo sapiens
tgaacatggagcccccggacgcaccggcccaggcgcgcggggccccgcggctgctgttgctcgcagtcctgctggcggcgcacccagatgcccaggcggaggtgcgcttgtctgtacccccgctggtggaggtgatgcgaggaaagtctgtcattctggactgcacccctacgggaacccacgaccattatatgctggaatggttccttaccgaccgctcgggagctcgcccccgcctagcctcggctgagatgcagggctctgagctccaggtcacaatgcacgacacccggggccgcagtcccccataccagctggactcccaggggcgcctggtgctggctgaggcccaggtgggcgacgagcgagactacgtgtgcgtggtgagggcaggggcggcaggcactgctgaggccactgcgcggctcaacgtgtttgcaaagccagaggccactgaggtctcccccaacaaagggacactgtctgtgatggaggactctgcccaggagatcgccacctgcaacagccggaacgggaacccggcccccaagatcacgtggtatcgcaacgggcagcgcctggaggtgcccgtagagatgaacccagagggctacatgaccagccgcacggtccgggaggcctcgggcctgctctccctcaccagcaccctctacctgcggctccgcaaggatgaccgagacgccagcttccactgcgccgcccactacagcctgcccgagggccgccacggccgcctggacagccccaccttccacctcaccctgcactatcccacggagcacgtgcagttctgggtgggcagcccgtccaccccagcaggctgggtacgcgagggtgacactgtccagctgctctgccggggggacggcagccccagcccggagtatacgcttttccgccttcaggatgagcaggaggaagtgctgaatgtgaatctcgaggggaacttgaccctggagggagtgacccggggccagagcgggacctatggctgcagagtggaggattacgacgcggcagatgacgtgcagctctccaagacgctggagctgcgcgtggcctatctggaccccctggagctcagcgaggggaaggtgctttccttacctctaaacagcagtgcagtcgtgaactgctccgtgcacggcctgcccacccctgccctacgctggaccaaggactccactcccctgggcgatggccccatgctgtcgctcagttctatcaccttcgattccaatggcacctacgtatgtgaggcctccctgcccacagtcccggtcctcagccgcacccagaacttcacgctgctggtccaaggctcgccagagctaaagacagcggaaatagagcccaaggcagatggcagctggagggaaggagacgaagtcacactcatctgctctgcccgcggccatccagaccccaaactcagctggagccaattggggggcagccccgcagagccaatccccggacggcagggttgggtgagcagctctctgaccctgaaagtgaccagcgccctgagccgcgatggcatctcctgtgaagcctccaacccccacgggaacaagcgccatgtcttccacttcggcaccgtgagcccccagacctcccaggctggagtggccgtcatggccgtggccgtcagcgtgggcctcctgctcctcgtcgttgctgtcttctactgcgtgagacgcaaagggggcccctgctgccgccagcggcgggagaagggggctccgccgccaggggagccagggctgagccactcggggtcggagcaaccagagcagaccggccttctcatgggaggtgcctccggaggagccaggggtggcagcgggggcttcggagacgagtgctgagccaagaacctcctagaggctgtccctggacctggagctgcaggcatcagagaaccagccctgctcacgccatgcccgcccccgccttccctcttccctcttccctctccctgcccagccctcccttccttcctctgccggcaaggcagggacccacagtggctgcctgcctccgggagggaaggagagggagggtgggtgggtgggagggggccttcctccagggaatgtgactctcccaggccccagaatagctcctggacccaagcccaaggcccagcctgggacaaggctccgagggtcggctggccggagctatttttacctcccgcctcccttgctggtccccccacctgacgtcttgctgcagagtctgacactggattcccccccctcaccccgcccctggtcccactcctgcccccgccctacctccgccccaccccatcatctgtggacactggagtctggaataaatgctgtttgtcacatcaaaaaaaaaaaaaaaaaaaaaaaaaaaaaaaaaaaaaaaaaaaaaaaaaaaaaaaaaaaaaaaaaaaaaaaaaaaaaaaaaaaaaaaaaaaaaa

SEQ ID NO: 83 - protein, 628 aa, Homo sapiens
MEPPDAPAQARGAPRLLLLAVLLAAHPDAQAEVRLSVPPLVEVMRGKSVILDCTPTGTHDHYMLEWFLTDRSGARPRLASAEMQGSELQVTMHDTRGRSPPYQLDSQGRLVLAEAQVGDERDYVCVVRAGAAGTAEATARLNVFAKPEATEVSPNKGTLSVMEDSAQEIATCNSRNGNPAPKITWYRNGQRLEVPVEMNPEGYMTSRTVREASGLLSLTSTLYLRLRKDDRDASFHCAAHYSLPEGRHGRLDSPTFHLTLHYPTEHVQFWVGSPSTPAGWVREGDTVQLLCRGDGSPSPEYTLFRLQDEQEEVLNVNLEGNLTLEGVTRGQSGTYGCRVEDYDAADDVQLSKTLELRVAYLDPLELSEGKVLSLPLNSSAVVNCSVHGLPTPALRWTKDSTPLGDGPMLSLSSITFDSNGTYVCEASLPTVPVLSRTQNFTLLVQGSPELKTAEIEPKADGSWREGDEVTLICSARGHPDPKLSWSQLGGSPAEPIPGRQGWVSSSLTLKVTSALSRDGISCEASNPHGNKRHVFHFGTVSPQTSQAGVAVMAVAVSVGLLLLVVAVFYCVRRKGGPCCRQRREKGAPPPGEPGLSHSGSEQPEQTGLLMGGASGGARGGSGGFGDEC

SEQ ID NO: 84 - DNA, 2593 bp, Homo sapiens
agttgtctttggtagttttttgcactaacttcaggaaccagctcatgatctcaggatgtatggaaaaataatctttgtattactattgtcagcaattgtgagcatatcagcatcaagtaccactggtgtggcaatgcacacttcaacctcttcttcagtcacaaagagttacatctcatcacagacaaatgatacgcacaaacgggacacatatgcagccactcctagagctcatgaagtttcagaaatttctgttagaactgtttaccctccagaagaggaaaccggagaaagggtacaacttgcccatcatttctctgaaccagagataacactcattatttttggggtgatggctggtgttattggaacgatcctcttaatttcttacggtattcgccgactgataaagaaaagcccatctgatgtaaaacctctcccctcacctgacacagacgtgcctttaagttctgttgaaatagaaaatccagagacaagtgatcaatgagaatctgttcaccaaaccaaatgtggaaagaacacaaagaagacataagacttcagtcaagtgaaaaattaacatgtggactggacactccaataaattatatacctgcctaagttgtacaatttcagaatgcaattttcattataatgagttccagtgactcaatgatggggaaaaaaatctctgctcattaatatttcaagataaagaacaaatgtttccttgaatgcttgcttttgtgtgttagcataatttttagaattgtttgagaattctgatccaaaactttagttgaattcatctacgtttgtttaatattaacttaacctattctattgtattataatgatgattctgtcaaatgaaaggcttgaaatacctagatgaagtttagattttcttcctattgtaaacttttgagtctggtttcattgttttaaataaattaaggggacactaaagtcctatcattcattccttcattctgaacaggcaagatataatattacatgaatgattactatattttgttcacactaataaagcttatgctcagaaatgccatacacacacacaaacacacacatttatcatttaatgcataaatcaacacaaaaggttttcccattaatatgaaatattacatatatataagtgccatatttaaaataatttgtctaacagtagaactatgtcggagcactcactgaagcttcgatttcccactgaaagagttatttgttgtaagtagagttatcccggagaaggaaaaagaacttacgacctttctttataacagaaagctcaactctaaattcaacaagatgtgcaaaccggacatgcaggtgaatattttaataggttactataaggttctcaattaaattctttaatctgtccagtcccagtttctcttattaataaaactttggaaattgctttaaaccatttaaaggaaatttctagatatagaaactaaaggactgtgactatacagtgtcactcatttgtagtaaaacttaaaaagcaaaaacaaaaaacaaaaaagaccttcctgtgatactttatttccgaactaataaaaatctatatgactttttattattgtgtgataaccaagtaaatgttttctattttcgatattttcaggcatggtaacagaaatttaccttttaataaattaaaaaatctaaattttaacctacttgtatgttcggagagtgtttttgtactatattgactacttaaaatagagaatgagactaagaagggaacatttctgttgatacatgttttttaaaagtaatttttaagagcattattaggttaatttaatccaattaatgacccaaatgccaaggtaattttaaatttacatttttaataaaagcaacatgttgaaacaagagagggtgagattaacctttttgctaaagtaatttacaagtcaaagacaggaagagatcagagtgaatgtgccttcttaaccagagctacagaatttagtgaataattaaagtacaaactgctttgacctccttgaacttttccaagcaatttctctgtacttctatatatgaatgtcttagccaattttctgctactataacagaatacgacagactgggtaatttaaaaagaaaagaaatttattttcttcctagttctggaggctgggaaggcgaagggcatggcactgacatctgccttgtaactgatgagaaccttcttactgcatgataacaaagcagcaaggcaagcaaaagcgtaagatgaagagagaggaaatgaagccaaacacatcctttcatcagaagcccattccctctataaggcgttactacatttatgagaatggagtcctcatgacctaatcgtgaccttaaaggcccctcccaacactgttacaatggcaattaaatttcaacaaaggttccagaggtgacattcgaatcagcaatgaaattttcatagttaaatttggtattcgtgggggaagaaatgaccatttcccttgtatttttataattaaatcagcaaaatattgtaataaagaaatctttcctgtgaagataccatgacccc

SEQ ID NO: 85 - protein, 150 aa, Homo sapiens
MYGKIIFVLLLSAIVSISASSTTGVAMHTSTSSSVTKSYISSQTNDTHKRDTYAATPRAHEVSEISVRTVYPPEEETGERVQLAHHFSEPEITLIIFGVMAGVIGTILLISYGIRRLIKKSPSDVKPLPSPDTDVPLSSVEIENPETSDQ

SEQ ID NO: 86 - DNA, 526 bp, Homo sapiens
agttgtctttggtagtttttttgcactaacttcaggaaccagctcatgatctcaggatgtatggaaaaataatctttgtattactattgtcagaaattgtgagcatatcagcattaagtaccactgaggtggcaatgcacacttcaacctcttcttcagtcacaaagagttacatctcatcacagacaaatggagaaacgggacaacttgtccatcgtttcactgtaccagctcctgtagtgataatactcattattttgtgtgtgatggctggtattattggaacgatcctcttaatttcttacactattcgccgactgataaaggcatgaggatgtggcctgcatgctgcctgtattgcctgcatgctgcctgatcttgcgataaccggctgcacctgctgttctcttctttatgcaaactggctgcacctgctattcctttgcttatgcccctacccctggctatcctaattccctgttctcctgcctcactattactgtattctctacttctaaataaaaaa

SEQ ID NO: 87 - protein, 91 aa, Homo sapiens
MYGKIIFVLLLSEIVSISALSTTEVAMHTSTSSSVTKSYISSQTNGETGQLVHRFTVPAPVVIILIILCVMAGIIGTILLISYTIRRLIKA

SEQ ID NO: 88 - DNA, 1075 bp, Homo sapiens
gagcccctcccctcggcccgcgcgggaggagtgtgacccaggtgccgcttcctctcgccgccgagggtcaggagcccgggagcgcgaccctcccccggcccggcctggcccggcctggccagtccccgcggtctctgcccgggctgacgcccaggaatgtggtcgacgagaagccccaacagcacggcgtggcctctcagcctcgagcctgatccggggatggcctctgcctccaccacaatgcatactaccaccattgcagagcctgatccagggatgtctggatggccggatggcagaatggagacctccacccccaccataatggacattgtcgtcattgcaggtgtgattgctgctgtggccatcgtcctagtctccctcctcttcgtcatgctgcgctacatgtaccggcacaagggcacgtaccacaccaatgaggccaagggcacggagtttgctgagagtgcagatgcagccctgcagggagaccctgccctccaagatgctggtgatagcagcagaaaggagtactttatttgagggacaacagacttcacttccctgaatgcctcccccatctccatcaggaaaaatacaccccatcgcccagcacccctgctgataccaccagacagagagagagagcacttgattcttcccgagatagccacctggaaacactaggtgcctgcccagggaggaacggaggaggactcgcgctacaagaggccactcccagggacccagggaggcgatggccaccccagaggccaccttttgctccacggaggtgggagaaaatctgggcacatggggccccctgggcagtgcaggacaacatcagctcactggcaggaaagtccttgttgagggtgagggggtgctggggtacccgggggctggggaagcaaggaaataagtcatctgtatgctgactggggataatggcatcaaatgtcagtccttgacatttggggggaacagcaggtgccagagctaaaaggtacctttgtctgccattgatccagctcagaacgattggaaataaatttgaaatgtaaccgagcaaaaa

SEQ ID NO: 89 - protein, 128 aa, Homo sapiens
MWSTRSPNSTAWPLSLEPDPGMASASTTMHTTTIAEPDPGMSGWPDGRMETSTPTIMDIVVIAGVIAAVAIVLVSLLFVMLRYMYRHKGTYHTNEAKGTEFAESADAALQGDPALQDAGDSSRKEYFI

SEQ ID NO: 90 - DNA, 1559 bp, Homo sapiens
atcgctccctcaagccctcaagtaggtgttggagagaggggtgatgcctggtgctggtggaacccctgcacagagacggacacaggatgagctctaagtacccgcggtctgtccggcgctgcctgcccctctgggccctaacactggaagcagctctcattctcctcttctatttttttacccactatgacgcttccttagaggatcaaaaggggctcgtggcatcctatcaagttggccaagatctgaccgtgatggcggccattggcttgggcttcctcacctcgagtttccggagacacagctggagcagtgtggccttcaacctcttcatgctggcgcttggtgtgcagtgggcaatcctgctggacggcttcctgagccagttcccttctgggaaggtggtcatcacactgttcagtattcggctggccaccatgagtgctttgtcggtgctgatctcagtggatgctgtcttggggaaggtcaacttggcgcagttggtggtgatggtgctggtggaggtgacagctttaggcaacctgaggatggtcatcagtaatatcttcaacacagactaccacatgaacctgaggcacttctacgtgttcgcagcctattttgggctgactgtggcctggtgcctgccaaagcctctacccaagggaacggaggataatgatcagagagcaacgatacccagtttgtctgccatgctgggcgccctcttcttgtggatgttctggccaagtgtcaactctcctctgctgagaagtccaatccaaaggaagaatgccatgttcaacacctactatgctctagcagtcagtgtggtgacagccatctcagggtcatccttggctcacccccaaaggaagatcagcatgacttatgtgcacagtgcggtgttggcaggaggcgtggctgtgggtacctcgtgtcacctgatcccttctccgtggcttgccatggtgctgggtcttgtggctgggctgatctccatcgggggagccaagtgcctgccggtgtgttgtaaccgagtgctggggattcaccacatctccgtcatgcactccatcttcagcttgctgggtctgcttggagagatcacctacattgtgctgctggtgcttcatactgtctggaacggcaatggcatgattggcttccaggtcctcctcagcattggggaactcagcttggccatcgtgatagctctcacgtctggtctcctgacaggtttgctcctaaatctcaaaatatggaaagcacctcatgtggctaaatattttgatgaccaagttttctggaagtttcctcatttggctgttggattttaagcaaaagcatccaagaaaaacaaggcctgttcaaaaacaagacaacttcctctcactgttgcctgcatttgtacgtgagaaacgctcatgacagcaaagtctccttatgtataatgaaacaaggtcagagacagatttgatattaaaaaattaaagactaaaaacttagtttaagagtcaatttaataagtttaaaataaatgtttagtttcattagga

SEQ ID NO: 91 - protein, 417 aa, Homo sapiens
MSSKYPRSVRRCLPLWALTLEAALILLFYFFTHYDASLEDQKGLVASYQVGQDLTVMAAIGLGFLTSSFRRHSWSSVAFNLFMLALGVQWAILLDGFLSQFPSGKVVITLFSIRLATMSALSVLISVDAVLGKVNLAQLVVMVLVEVTALGNLRMVISNIFNTDYHMNLRHFYVFAAYFGLTVAWCLPKPLPKGTEDNDQRATIPSLSAMLGALFLWMFWPSVNSPLLRSPIQRKNAMFNTYYALAVSVVTAISGSSLAHPQRKISMTYVHSAVLAGGVAVGTSCHLIPSPWLAMVLGLVAGLISIGGAKCLPVCCNRVLGIHHISVMHSIFSLLGLLGEITYIVLLVLHTVWNGNGMIGFQVLLSIGELSLAIVIALTSGLLTGLLLNLKIWKAPHVAKYFDDQVFWKFPHLAVGF

SEQ ID NO: 92 - DNA, 1805 bp, Homo sapiens
aaagcctgcgagcgccagccgagatcgcagcccaacccatggccgggtctcctagccgcgccgcgggccggcgactgcagcttcccctgctgtgcctcttcctccagggcgccactgccgtcctctttgctgtctttgtccgctacaaccacaaaaccgacgctgccctctggcaccggagcaaccacagtaacgcggacaatgaattttactttcgctacccaagcttccaggacgtgcatgccatggtcttcgtgggctttggcttcctcatggtcttcctgcagcgttacggcttcagcagcgtgggcttcaccttcctcctggccgcctttgccctgcagtggtccacactggtccagggctttctccactccttccacggtggccacatccatgttggcgtggagagcatgatcaatgctgacttttgtgcgggggccgtgctcatctcctttggtgccgtcctgggcaagaccgggcctacccagctgctgctcatggccctgctggaggtggtgctgtttggcatcaatgagtttgtgctccttcatctcctgggggtgagagatgccggaggctccatgactatccacacctttggtgcctacttcgggctcgtcctttcgcgggttctgtacaggccccagctggagaagagcaagcaccgccagggctccgtctaccattcagacctcttcgccatgattgggaccatcttcctgtggatcttctggcctagcttcaatgctgcactcacagcgctgggggctgggcagcatcggacggccctcaacacatactactccctggctgccagcacccttggcacctttgccttgtcagcccttgtaggggaagatgggaggcttgacatggtccacatccaaaatgcagcgctggctggaggggttgtggtggggacctcaagtgaaatgatgctgacaccctttggggctctggcagctggcttcttggctgggactgtctccacgctggggtacaagttcttcacgcccatccttgaatcaaaattcaaagtccaagacacatgtggagtccacaacctccatgggatgccgggggtcctgggggccctcctgggggtccttgtggctggacttgccacccatgaagcttacggagatggcctggagagtgtgtttccactcatagccgagggccagcgcagtgccacgtcacaggccatgcaccagctcttcgggctgtttgtcacactgatgtttgcctctgtgggcgggggccttggagggctcctgctgaagctaccctttctggactcccccccagactcccagcactacgaggaccaagttcactggcaggtgcctggcgagcatgaggataaagcccagagacctctgagggtggaggaggcagacactcaggcctaacccactgccagcccctgagaggacacgctccttttcgaagatgctgactggctgctactaggaagttctttttgagctcccattcctccagctgcaagaagggagccatgagccagaaggaggcccctttccacaggcagcgtctccacagggagaggggcaacaggaggctgggaaatggtggggagtggggccgtaactgggtacaatagggggaacctcaccagatgcccaacccgactgccctaccagcctgcacatgggtagaagaggccaaattgaggcacccaagtgatccactggccccacgtcacacagttacagtgaagcccaagccaggcctggttgagggtgataaacgccactgtctctaaaaaaaaaaaaaaaaaa

SEQ ID NO: 93 - protein, 458 aa, Homo sapiens
MAGSPSRAAGRRLQLPLLCLFLQGATAVLFAVFVRYNHKTDAALWHRSNHSNADNEFYFRYPSFQDVHAMVFVGFGFLMVFLQRYGFSSVGFTFLLAAFALQWSTLVQGFLHSFHGGHIHVGVESMINADFCAGAVLISFGAVLGKTGPTQLLLMALLEVVLFGINEFVLLHLLGVRDAGGSMTIHTFGAYFGLVLSRVLYRPQLEKSKHRQGSVYHSDLFAMIGTIFLWIFWPSFNAALTALGAGQHRTALNTYYSLAASTLGTFALSALVGEDGRLDMVHIQNAALAGGVVVGTSSEMMLTPFGALAAGFLAGTVSTLGYKFFTPILESKFKVQDTCGVHNLHGMPGVLGALLGVLVAGLATHEAYGDGLESVFPLIAEGQRSATSQAMHQLFGLFVTLMFASVGGGLGGLLLKLPFLDSPPDSQHYEDQVHWQVPGEHEDKAQRPLRVEEADTQA

SEQ ID NO: 94 - DNA, 3637 bp, Homo sapiens
cagcggctgcaggacttcaccaagggaccctgaggctcgtgagcagggacccgcggtgcgggttatgctgggggctcagatcaccgtagacaactggacactcaggaccacgccatggaggagctgcaggatgattatgaagacatgatggaggagaatctggagcaggaggaatatgaagacccagacatccccgagtcccagatggaggagccggcagctcacgacaccgaggcaacagccacagactaccacaccacatcacacccgggtacccacaaggtctatgtggagctgcaggagctggtgatggacgaaaagaaccaggagctgagatggatggaggcggcgcgctgggtgcaactggaggagaacctgggggagaatggggcctggggccgcccgcacctctctcacctcaccttctggagcctcctagagctgcgtagagtcttcaccaagggtactgttctcctagacctgcaagagacctccctggctggagtggccaaccaactgctagacaggtttatctttgaagaccagatccggcctcaggaccgagaggagctgctccgggccctgctgcttaaacacagccacgctggagagctggaggccctggggggtgtgaagcctgcagtcctgacacgctctggggatccttcacagcctctgctcccccaacactcctcactggagacacagctcttctgtgagcagggagatgggggcacagaagggcactcaccatctggaattctggaaaagattcccccggattcagaggccacgttggtgctagtgggccgcgccgacttcctggagcagccggtgctgggcttcgtgaggctgcaggaggcagcggagctggaggcggtggagctgccggtgcctatacgcttcctctttgtgttgctgggacctgaggccccccacatcgattacacccagcttggccgggctgctgccaccctcatgtcagagagggtgttccgcatagatgcctacatggctcagagccgaggggagctgctgcactccctagagggcttcctggactgcagcctagtgctgcctcccaccgatgccccctccgagcaggcactgctcagtctggtgcctgtgcagagggagctacttcgaaggcgctatcagtccagccctgccaagccagactccagcttctacaagggcctagacttaaatgggggcccagatgaccctctgcagcagacaggccagctcttcgggggcctggtgcgtgatatccggcgccgctacccctattacctgagtgacatcacagatgcattcagcccccaggtcctggctgccgtcatcttcatctactttgctgcactgtcacccgccatcaccttcggcggcctcctgggagaaaagacccggaaccagatgggagtgtcggagctgctgatctccactgcagtgcagggcattctcttcgccctgctgggggctcagcccctgcttgtggtcggcttctcaggacccctgctggtgtttgaggaagccttcttctcgttctgcgagaccaacggtctagagtacatcgtgggccgcgtgtggatcggcttctggctcatcctgctggtggtgttggtggtggccttcgagggtagcttcctggtccgcttcatctcccgctatacccaggagatcttctccttcctcatttccctcatcttcatctatgagactttctccaagctgatcaagatcttccaggaccacccactacagaagacttataactacaacgtgttgatggtgcccaaacctcagggccccctgcccaacacagccctcctctcccttgtgctcatggccggtaccttcttctttgccatgatgctgcgcaagttcaagaacagctcctatttccctggcaagctgcgtcgggtcatcggggacttcggggtccccatctccatcctgatcatggtcctggtggatttcttcattcaggatacctacacccagaaactctcggtgcctgatggcttcaaggtgtccaactcctcagcccggggctgggtcatccacccactgggcttgcgttccgagtttcccatctggatgatgtttgcctccgccctgcctgctctgctggtcttcatcctcatattcctggagtctcagatcaccacgctgattgtcagcaaacctgagcgcaagatggtcaagggctccggcttccacctggacctgctgctggtagtaggcatgggtggggtggccgccctctttgggatgccctggctcagtgccaccaccgtgcgttccgtcacccatgccaacgccctcactgtcatgggcaaagccagcaccccaggggctgcagcccagatccaggaggtcaaagagcagcggatcagtggactcctggtcgctgtgcttgtgggcctgtccatcctcatggagcccatcctgtcccgcatccccctggctgtactgtttggcatcttcctctacatgggggtcacgtcgctcagcggcatccagctctttgaccgcatcttgcttctgttcaagccacccaagtatcacccagatgtgccctacgtcaagcgggtgaagacctggcgcatgcacttattcacgggcatccagatcatctgcctggcagtgctgtgggtggtgaagtccacgccggcctccctggccctgcccttcgtcctcatcctcactgtgccgctgcggcgcgtcctgctgccgctcatcttcaggaacgtggagcttcagtgtctggatgctgatgatgccaaggcaacctttgatgaggaggaaggtcgggatgaatacgacgaagtggccatgcctgtgtgaggggcgggcccaggccctagaccctcccccaccattccacatccccaccttccaaggaaaagcagaagttcatgggcacctcatggactcaggatcctcctggagcagcagctgaggccccagggctgtgggtggggaaggaaggcgtgtccaggagaccttccacaaagggtagcctggcttttctggctggggatggccgatggggcccacattagggggtttgttgcacagtccctcctgttgccacactttcactggggatcccgtgctggaagacttagatctgagccctccctcttcccagcacaggcaggggtagaagcaaaggcaggaggtgggtgagcgggtggggtgcttgctgtgtgaccttgggtaagtcccttgacctttccaggcctatatttcctcttctgtaaaatgggtatattgatgataatacccacattacaggatggttactgaggaccaaagatacatgtaaaatagggctttgtaaactccacagggactgttctatagcagtcatcatttgtctttgaacgtacccaaggtcacatagctgggatttgaactgagccgtgcagctgggatttgaaccaggccttctgatttcaaggtccgagctctgtcctctgtcagtcatgcgtccactttcccttcccctgtgactcctcccttccccactctgctcccagcccctaccttgagaccctcttctctgggcccagagagaggcgtcctgggtgaaggaaggtacaggcaggatgatccagggattgggctg

SEQ ID NO: 95 - protein, 911 aa, Homo sapiens
MEELQDDYEDMMEENLEQEEYEDPDIPESQMEEPAAHDTEATATDYHTTSHPGTHKVYVELQELVMDEKNQELRWMEAARWVQLEENLGENGAWGRPHLSHLTFWSLLELRRVFTKGTVLLDLQETSLAGVANQLLDRFIFEDQIRPQDREELLRALLLKHSHAGELEALGGVKPAVLTRSGDPSQPLLPQHSSLETQLFCEQGDGGTEGHSPSGILEKIPPDSEATLVLVGRADFLEQPVLGFVRLQEAAELEAVELPVPIRFLFVLLGPEAPHIDYTQLGRAAATLMSERVFRIDAYMAQSRGELLHSLEGFLDCSLVLPPTDAPSEQALLSLVPVQRELLRRRYQSSPAKPDSSFYKGLDLNGGPDDPLQQTGQLFGGLVRDIRRRYPYYLSDITDAFSPQVLAAVIFIYFAALSPAITFGGLLGEKTRNQMGVSELLISTAVQGILFALLGAQPLLVVGFSGPLLVFEEAFFSFCETNGLEYIVGRVWIGFWLILLVVLVVAFEGSFLVRFISRYTQEIFSFLISLIFIYETFSKLIKIFQDHPLQKTYNYNVLMVPKPQGPLPNTALLSLVLMAGTFFFAMMLRKFKNSSYFPGKLRRVIGDFGVPISILIMVLVDFFIQDTYTQKLSVPDGFKVSNSSARGWVIHPLGLRSEFPIWMMFASALPALLVFILIFLESQITTLIVSKPERKMVKGSGFHLDLLLVVGMGGVAALFGMPWLSATTVRSVTHANALTVMGKASTPGAAAQIQEVKEQRISGLLVAVLVGLSILMEPILSRIPLAVLFGIFLYMGVTSLSGIQLFDRILLLFKPPKYHPDVPYVKRVKTWRMHLFTGIQIICLAVLWVVKSTPASLALPFVLILTVPLRRVLLPLIFRNVELQCLDADDAKATFDEEEGRDEYDEVAMPV

SEQ ID NO: 96 - DNA, 2725 bp, Homo sapiens
agtaagcactctcccttgtcgtggaggtgggcaaatctttatcagccactgccttctgctgccaggaagccagctagagtggtctttaaagaaaactgggcatctcctgctacttaaaatcaaaaactacctaaaataaagattatagagccagaggaagagatagccatggaggacagccccactatggttagagtggacagccccactatggttaggggtgaaaaccaggtttcgccatgtcaagggagaaggtgcttccccaaagctcttggctatgtcaccggtgacatgaaagaacttgccaaccagcttaaagacaaacccgtggtgctccagttcattgactggattctccggggcatatcccaagtggtgttcgtcaacaaccccgtcagtggaatcctgattctggtaggacttcttgttcagaacccctggtgggctctcactggctggctgggaacagtggtctccactctgatggccctcttgctcagccaggacaggtcattaatagcatctgggctctatggctacaatgccaccctggtgggagtactcatggctgtcttttcggacaagggagactatttctggtggctgttactccctgtatgtgctatgtccatgacttgcccaattttctcaagtgcattgaattccatgctcagcaaatgggacctccccgtcttcaccctccctttcaacatggcgttgtcaatgtacctttcagccacaggacattacaatccgttctttccagccaaactggtcatacctataactacagctccaaatatctcctggtctgacctcagtgccctggagttgttgaaatctataccagtgggagttggtcagatctatggctgtgataatccatggacagggggcattttcctgggagccatcctactctcctccccactcatgtgcctgcatgctgccataggatcattgctgggcatagcagcgggactcagtctttcagccccatttgagaacatctactttggactctggggtttcaacagctctctggcctgcattgcaatgggaggaatgttcatggcgctcacctggcaaacccacctcctggctcttggctgtgccctgttcacggcctatcttggagtcggcatggcaaactttatggctgaggttggattgccagcttgtacctggcccttctgtttggccacgctattgttcctcatcatgaccacaaaaaattccaacatctacaagatgcccctcagtaaagttacttatcctgaagaaaaccgcatcttctacctgcaagccaagaaaagaatggtggaaagccctttgtgagaacaagccccatttgcagccatggtcacgagtcatttctgcctgactgctccagctaacttccagggtctcagcaaactgctgtttttcacgagtatcaactttcatactgacgcgtctgtaatctgttcttatgctcattttgtattttcctttcaactccaggaatatccttgagcatatgagagtcacatccaggtgatgtgctctggtatggaatttgaaaccccaatggggccttggcactaagactggaatgtatataaagtcaaagtgctccaacagaaggaggaagtgaaaacaaactattagtatttattgatattcttggtgtttagctggctcgatgatgttaacagtattaaaaattaaacccccataaacccaacctaagcctatggaatccacagtcacaaaatcgaagttaacccagaatctgtgataagcagcttggctttttttttaaatcaatgcaagtacaccattatagccagaatctgtatcacagaggtgcaagctgacagcagagctcagtccccacttcctgcaaacaatggcctgcaccctatcccttgtgtgtgtgacattctctcatgggacaatgttggggtttttcagactgacaggactgcaagagggagaaaggaattttgtcaatcaaaattattctgtattgcaacttttctcagagattgcaaaggattttttaggtagagattatttttccttatgaaaaatgatctgttttaaatgagataaaataggagaagttcctggcttaacctgttcttacatattaaagaaaagttacttactgtatttatgaaatactcagcttaggcatttttactttaacccctaaattgattttgtaaatgccacaaatgcatagaattgttaccaacctccaaagggctctttaaaatcatatttttttattcatttgaggatgtcttataaagactgaaggcaaaggtcagaatgcttacgggtgttatttttataagttgttgaattccttaatttagaaaagctcattattttttgcacactcacaatattctctctcagaaatcaatggcatttgaaccaccaaaaagaaataaagggctgagtgtggtgctcacgcctgtaatcccagcactttggggagcccaggcgggcagattgcttgaacccaggagttcaagaccagcctgggcagcatggtgaaaccctgtatctacaaaaaatacaaaaattagccaggcatggtggtgggtgcctgtagttccagctacttgggaggctgaggtgggaaaatgacttgagcccaggaggaggaggctgcagtgagctaagattgcaccactgcactccaacctgggtgacaagagtgaaactgaat

SEQ ID NO: 97 - protein, 389 aa, Homo sapiens
MEDSPTMVRVDSPTMVRGENQVSPCQGRRCFPKALGYVTGDMKELANQLKDKPVVLQFIDWILRGISQVVFVNNPVSGILILVGLLVQNPWWALTGWLGTVVSTLMALLLSQDRSLIASGLYGYNATLVGVLMAVFSDKGDYFWWLLLPVCAMSMTCPIFSSALNSMLSKWDLPVFTLPFNMALSMYLSATGHYNPFFPAKLVIPITTAPNISWSDLSALELLKSIPVGVGQIYGCDNPWTGGIFLGAILLSSPLMCLHAAIGSLLGIAAGLSLSAPFENIYFGLWGFNSSLACIAMGGMFMALTWQTHLLALGCALFTAYLGVGMANFMAEVGLPACTWPFCLATLLFLIMTTKNSNIYKMPLSKVTYPEENRIFYLQAKKRMVESPL

SEQ ID NO: 98 - DNA, 2725 bp, Homo sapiens; identical to SEQ ID NO: 96

SEQ ID NO: 99 - protein, 142 aa, Homo sapiens
MVLSPADKTNVKAAWGKVGAHAGEYGAEALERMFLSFPTTKTYFPHFDLSHGSAQVKGHGKKVADALTNAVAHVDDMPNALSALSDLHAHKLRVDPVNFKLLSHCLLVTLAAHLPAEFTPAVHASLDKFLASVSTVLTSKYR

SEQ ID NO: 100 - DNA, 575 bp, Homo sapiens
actcttctggtccccacagactcagagagaacccaccatggtgctgtctcctgccgacaagaccaacgtcaaggccgcctggggtaaggtcggcgcgcacgctggcgagtatggtgcggaggccctggagaggatgttcctgtccttccccaccaccaagacctacttcccgcacttcgacctgagccacggctctgcccaggttaagggccacggcaagaaggtggccgacgcgctgaccaacgccgtggcgcacgtggacgacatgcccaacgcgctgtccgccctgagcgacctgcacgcgcacaagcttcgggtggacccggtcaacttcaagctcctaagccactgcctgctggtgaccctggccgcccacctccccgccgagttcacccctgcggtgcacgcctccctggacaagttcctggcttctgtgagcaccgtgctgacctccaaataccgttaagctggagcctcggtagccgttcctcctgcccgctgggcctcccaacgggccctcctcccctccttgcaccggcccttcctggtctttgaataaagtctgagtgggcggc

SEQ ID NO: 101 - protein, 142 aa, Homo sapiens; identical to SEQ ID NO: 99

SEQ ID NO: 102 - DNA, 2697 bp, Homo sapiens
tggatatgggactcctgtttgtggcctgcctctcttccgagtcttccagtgcagtccagataacgatctctgagagtctcttgagaccactgaagcaagaggcttcaaggtttgttctaggcttctctagttggcaggtcttccccgatcccaccccctcccccagggctgccaggcgtattcctgcctgggcctcctggcacaagagataaaatgaacagggttactcccagtaactggtccaggagataccagcagagagggagtaggagagaagaaacatgtcagggtgctcacaggagtagtggggggaggttttgctatttccagattcttaagccaacaaaagtgccttcatattttctgtctggaagacagaaagcccagaaggagcccagaagcaacagtttgagagaggcgcttctgcggccaagtggataagaggagcggcctgcaaccatgggacagggtgagccaagccagcgctcgacagggcttgctggactgtatgcagcccccgcagcatcacctgttttcattaaaggaagtgggatggatgccctgggtatcaagagctgtgactttcaggcagcaagaaacaatgaggagcaccacaccaaggccctcagctcccggcgcctctttgtgaggagggggcagcccttcaccatcatcctgtacttccgcgctccagtccgtgcatttctgcctgccctgaagaaggtggccctcactgcacaaactggagagcagccttccaagatcaacaggacccaagccacattcccaatttccagtctgggggaccgaaagtggtggagtgcagtggtggaggagagagatgcccagtcctggaccatctctgtgaccacacctgcggacgctgtcattggccactactcgcttctgctgcaggtctcaggcaggaagcaactcctcttgggtcagttcacactgctttttaacccctggaatagagaggatgctgttttcctgaagaatgaggctcagcgcatggagtacttgttgaaccagaatggtctcatctacctgggtacagctgactgcatccaggcagagtcctgggactttggccagttcgagggggatgtcattgacctcagcctgcgcttgctgagcaaggacaagcaggtagagaagtggagccagccggtgcacgtggcccgtgtgttgggtgccttgctgcattttctcaaggagcagagggtcctgcccaccccgcagacccaggccacccaggaaggggccttgctgaacaagcgccggggcagcgtgcccatcctgcggcagtggctcaccggccgaggccgacctgtgtatgatggccaggcctgggtgttggctgctgttgcttgcacagtgctgcgatgcctgggaatccctgcccgcgtggtgaccacgtttgcctcagcacagggcaccggtgggcgtcttctcatagatgaatactataatgaggagggacttcagaacggagaaggccagagaggcagaatctggatcttccagacttccacagagtgctggatgacgcggcctgccttgccccagggttatgatggatggcagattctcgacccaagtgctcctaatggaggtggagtcctggggtcctgtgatctggtgccggtcagagcagtcaaggaggggaccgtggggctgaccccagcagtgtcagacctttttgctgccataaatgcctcatgtgtggtctggaagtgctgtgaggatgggacactggagttgactgactccaacacaaagtatgttggcaacaacatcagcaccaagggtgtgggcagtgaccgctgcgaggacatcactcagaactacaagtatcctgaagggtctcttcaggaaaaagaggtgctggagagagtcgagaaagagaaaatggaacgtgagaaagacaacggcatccgtcctcccagtctcgagactgccagtcctctgtacctgctcttgaaagcacccagctccctacccctgagaggggatgcccagatctcagtgacgctggttaatcacagtgagcaggagaaggcagtgcagctggcaattggggtccaggctgtacactacaacggtgtccttgctgccaagctctggaggaagaagctgcacctcacgctcagtgccaacctggaaaagataataaccatcggcctgttcttctccaattttgagcgaaacccacccgagaacaccttccttagactcaccgccatggcaacacactctgaatccaaccttagctgctttgctcaggaagacattgccatttgtagaccacaccttgccatcaagatgccagagaaagcagagcagtatcaacccctcacagcctcagtcagcctccagaactccctagatgcccccatggaggactgtgtgatctccatcctgggaagggggctcattcacagagagaggagctacagattccgttcagtgtggcctgaaaacaccatgtgtgccaagttccagttcacgccaacacatgtggggctccagagactcactgtggaagtggactgcaacatgttccagaacctaaccaactataaaagcgtcaccgtggtagcccctgaactatcagcttaaacttccagctctatcaccactctcctgccaacccttgttctacaatctaaaccaaacatgtgctaggaagag

SEQ ID NO: 103 - protein, 721 aa, Homo sapiens
MGQGEPSQRSTGLAGLYAAPAASPVFIKGSGMDALGIKSCDFQAARNNEEHHTKALSSRRLFVRRGQPFTIILYFRAPVRAFLPALKKVALTAQTGEQPSKINRTQATFPISSLGDRKWWSAVVEERDAQSWTISVTTPADAVIGHYSLLLQVSGRKQLLLGQFTLLFNPWNREDAVFLKNEAQRMEYLLNQNGLIYLGTADCIQAESWDFGQFEGDVIDLSLRLLSKDKQVEKWSQPVHVARVLGALLHFLKEQRVLPTPQTQATQEGALLNKRRGSVPILRQWLTGRGRPVYDGQAWVLAAVACTVLRCLGIPARVVTTFASAQGTGGRLLIDEYYNEEGLQNGEGQRGRIWIFQTSTECWMTRPALPQGYDGWQILDPSAPNGGGVLGSCDLVPVRAVKEGTVGLTPAVSDLFAAINASCVVWKCCEDGTLELTDSNTKYVGNNISTKGVGSDRCEDITQNYKYPEGSLQEKEVLERVEKEKMEREKDNGIRPPSLETASPLYLLLKAPSSLPLRGDAQISVTLVNHSEQEKAVQLAIGVQAVHYNGVLAAKLWRKKLHLTLSANLEKIITIGLFFSNFERNPPENTFLRLTAMATHSESNLSCFAQEDIAICRPHLAIKMPEKAEQYQPLTASVSLQNSLDAPMEDCVISILGRGLIHRERSYRFRSVWPENTMCAKFQFTPTHVGLQRLTVEVDCNMFQNLTNYKSVTVVAPELSA

SEQ ID NO: 104 - DNA, 1080 bp, Homo sapiens
tccaaaatgaagggtctgtggaaggacatgaataaagcacaggaggttgaagtcagatttgcagctttctaggcaggagacaagacaatctgcatcttcacaggagggatggccatgctcctgggggcatcagtgctgattctgtggcttcagccagactgggtaaacagtcaacagaagaatgatgaccagcaagttaagcaaaattcaccatccctgagcgtccaggaaggaagaatttctattctgaactgtgactatactaacagcatgtttgattatttcctatggtacaaaaaataccctgctgaaggtcctacattcctgatatctataagttccattaaggataaaaatgaagatggaagattcactgtcttcttaaacaaaagtgccaagcacctctctctgcacattgtgccctcccagcctggagactctgcagtgtacttctgtgcagcaaagggggccggcactgccagtaaactcacctttgggactggaacaagacttcaggtcacgctcgatatccagaaccctgaccctgccgtgtaccagctgagagactctaaatccagtgacaagtctgtctgcctattcaccgattttgattctcaaacaaatgtgtcacaaagtaaggattctgatgtgtatatcacagacaaaactgtgctagacatgaggtctatggacttcaagagcaacagtgctgtggcctggagcaacaaatctgactttgcatgtgcaaacgccttcaacaacagcattattccagaagacaccttcttccccagcccagaaagttcctgtgatgtcaagctggtcgagaaaagctttgaaacagatacgaacctaaactttcaaaacctgtcagtgattgggttccgaatcctcctcctgaaagtggccgggtttaatctgctcatgacgctgcggctgtggtccagctgagatctgcaagattgtaagacagcctgtgctccctcgctccttcctctgcattgcccctcttctccctctccaaacagagggaactctcccacccccaaggaggtgaaagctgctaccaccctctgtgcc

SEQ ID NO: 105 - protein, 280 aa, Homo sapiens [sequence omitted]

SEQ ID NO: 106 - DNA, 5423 bp, Homo sapiens
cccgggccaccgcctccgcccggctgcccgcccggactgtcgcggcccgcggtggcgacggcggccgctgcaaagtttccccggcggcggcggcccgggggcgcatcctcccgcaactgtcaagcgctggcggcggaaatgatgaggcgctggccattttccgagcccgggtttcctgcctgagccccgctcgagcgagccgcgagcgaggagccggcgggcgggagaggacgcgcccagggcgggggcccgcccgccccctcgggatttcgagggcccgggggcgcgcgacgccatgggccggccgggcccagagctcctgtctctcagcccggccgcaccacctgggtctccgccatgaacgggcctgccctgcagccctcctcgccctcttccgcgccctcagcctccccggcggcggccccgcggggctggagcgagttctgtgagttgcacgccgtagcggcggcccgggagctggcccgccagtactggctgttcgcccgggagcatccgcagcacgcgccgctgcgcgccgagctggtgtcgctgcagttcaccgacctcttccagcgctacttctgccgcgaggtgcgcgacggacgggcgccgggccgcgactaccgggacacaggccgtgggcccccagccaaggccgaggcgtccccggagccaggccccggccccgccgcccctggcctgcccaaggcccgcagctctgaggagctggccccgccgcggccgcccgggccctgctccttccagcactttcgccgcagcctccgccacatcttccgccgccgctcggccggggagctgccagcggcccacaccgctgccgcccccgggacccccggagaggctgctgagacccccgcccggcctggcctggccaagaagttcctgccctggagcctggcccgggagccgccacccgaggcgctgaaggaggcggtgctgcgctacagcctggccgacgaggcctccatggacagcggggcacgctggcagcgcgggaggctggcgctgcgccgggccccgggccccgatggccccgaccgcgtgctggagctcttcgacccacccaagagttcaaggcccaagctacaagcagcttgctccagcatccaggaggtccggtggtgcacacggcttgagatgcctgacaacctttacacctttgtgctgaaggtgaaggaccggacagacatcatctttgaggtgggagacgagcagcagctgaattcatggatggctgagctctcggagtgcacaggccgagggctggagagcacagaagcagagatgcatattccctcagccctagagcctagcacgtccagctccccaaggggcagcacagattcccttaaccaaggtgcttctcctggggggctgctggacccggcctgccagaagacggaccatttcctgtcctgctacccctggttccacggccccatctccagagtgaaagcagctcagctggttcagctgcagggccctgatgctcatggagtgttcctggtgcggcagagcgagacgcggcgtggggaatacgtgctcactttcaactttcaggggatagccaagcacctgcgcctgtcgctgacagagcggggccagtgccgtgtgcagcacctccactttccctcggtcgtggacatgctccaccacttccagcgctcgcccatcccactcgagtgcggcgccgcctgtgatgtccggctctccagctacgtggtagtcgtctcccaaccaccaggttcctgcaacacggtcctcttccctttctcccttcctcactgggattcagagtcccttcctcactggggttcagagttgggccttccccaccttagttcttctggctgtccccgggggctcagcccagagggtctcccagggcgatcctcaccccccgagcagatcttccacctggtgccttcgcccgaagaactggccaacagcctgcagcacctggagcatgagcctgtgaatcgagcccgggactcggactacgaaatggactcatcctcccggagccacctgcgggccatagacaatcagtacacacctctctgaccagtgaggaattccaggcctcaacagctgcccttgaggagcacaggcagaagtgtgaacttgtgaatgtaattgatctttccttccttccagagaaagatttaagggacactgttaactgctcgtgccagtttggaagtgacccttctattaggcctgttgaagggccctcctgtaggtttcatctatccacctggctttctccttattgtttacagatgtagttcttgttagaggatgccgctagctcctgcccggggtccctatgcccagtccccgttactcttagagaaaggagttggggtgagggccagagctggcagtggaaacttgttctctttttcactgacactgtcacagcggatgacagactttctacggggaggagggggggatcatcaggaagcccagaacactaacaagcggttctcccatctaccgtcagtccacatggcaggtctgctgtgtccacaccacagatgaccacatctaatcctgcttctactctcagctttaggacaaaagctctgtcagaggcacaagctgaaggtcaaaaatgatttaaaacattttacctcagactaatttctttaaaggattcaggttcaaaacttaaccactgcttatttcagtgcactgtttcaactaacacccatgctatttttgtagtcagaaacagctatgcaaaccctacctaatttacagtctgagccagcatgctggcttgtctactgcatcctcgggacagtcacctgccactgagtggccactgtccttcctaaatgtcaagaagtgaagtatgtcaccctttcagggaaattcaggcaattactgaaataggaaggtggcaagaacagttctatcctggtgccttacgaataaaaaactggattctggtttacagcagctttacagtgatagttaaattaactggggctaggggaaaagcaaccaaaaagggaaaaaggactcctaggccctttctattaaatccttcagcaacaaggctggcttggtgccctccaagcatctaatggcttattaaattatcccacaattgggttttaggctccttttttgacccaaaatggaagctgggaatctggtgccataactaatgagaaactcctttaataccccacaatcagtgttctgttctacctggctactgcttcactggattgaaaatctatctatctccttgcacacatgggcacacacaatctccaccatccagggaggtcctgaattcaaatctctatctatccaagtgatacaattcatagggggctggctcctcccagaacctgtctggaggctcagaaacgggggcagtgacagtggagtcagctgctcttgggtgccagcagagccattcagtacaacccccaggctcacagcagtggcttctaggaaactgggagtttagatcagctttacagatacatcgatcagaggctaaaatgaaacctcagcctaaaactcataggactgactgcctgggaggagggttaggtctgcttcttccacttatacttagtctctgtgctccaagaggtcaaatttttgcttctagaatttccttggggtctttcagagggtgggggaacaaacccctatgcacttttcttttttttttttgagatggagtttctcttgtcaaccgggctggagtgcagtggtgcaatcttggctcactgcaacctccaccttcctggttcaagcgattctgcctcgacctctcaagtagctgggattacaagcaccagccaccatgcctggctaattttgtatttttagtagagacagggtttcaccatgttggccaggctggtctcgaatgtctgacctcaggtgatccacccgccttggcctcccaaagtgctgggattacaggcgcgagccaccgcgcccagcctacaccacttttagtaccaacactcttgggtgatttcatggaccctaaagcagacctgacactgatccagatttgcagtccatttttaaggacacctgtctttatttcctcaaagtcaagcagctttctctggaaaatgaatgctaattagtgtgaaccaaaagagtaagtaagagtctgaagtttttttaaaggagaaagcttattatggaaagtcactggtcctcccctccgcacaggaaaggtacccagtagataatgaaccaaattaagttccctccctccagccagaagttaaacatctgggatatgacgtcttcatgccaggggcactcatttcttagcagcctctctacatacatctctcaggtggtgccaagaggcacaccaggtagagcaaacttagcagctctgactaacaggctgcaaagtgcaagttcagattctgtggcagagatttggagggcacccacgtccagactgcttcccgtccaagttaccaggacagctcaaaaacatgctgacagaaaactcccatggctctaggaaaaagtgacactaagccaacacctttctttatgtgggagcaaaatcagctgatgaaggggtgggcaccattgtggggcaggcaccccactggctgcagctagcccaccataggcacagcacatcccaccactctccttccagtcctgaccaggccccagccggcaacttctaccgagagccatggctcaacaccaaactggacagtagacatcatgatccctccagttagctctaattacagaccccaccagtacagcttgacagctcccggcaccatcccttccttcatctgacttattgaacttttacaaactaacagtcaccagcaccaaagaattaagtcaactaacctgccttgaattttaaaccagcaatccatatggctttatctggtataaatcttctgcctttgatcatttctggaccgtaggaaaaaggaatagcaatcattaaaatcttgggccagagaacactatttttacataacagtttcttaacctaaagtcaaggccttggactcttccctgagggttgcctgaaattccttcatgctttctattcaggactaattcccttactgcaaatgtgttagctctaacatctcccacaagctaaaggaacttgcaagtatattaacaaggacacatctgacatcctgtgtttggttaaaatatacagcacattgtgataacataaagtggatccatcttgtatcattataggcaaaaggtatttggcaaatttttatgtatggttttatgtactgtacaagtaacttattcttgaataatgcaaattttgctataatgtacaaattgctatatgtgaattaaaaagtttccaaaatcttgaaaaaaaaaaaaaaaaaaaa

SEQ ID NO: 107 - protein, 575 aa, Homo sapiens
MNGPALQPSSPSSAPSASPAAAPRGWSEFCELHAVAAARELARQYWLFAREHPQHAPLRAELVSLQFTDLFQRYFCREVRDGRAPGRDYRDTGRGPPAKAEASPEPGPGPAAPGLPKARSSEELAPPRPPGPCSFQHFRRSLRHIFRRRSAGELPAAHTAAAPGTPGEAAETPARPGLAKKFLPWSLAREPPPEALKEAVLRYSLADEASMDSGARWQRGRLALRRAPGPDGPDRVLELFDPPKSSRPKLQAACSSIQEVRWCTRLEMPDNLYTFVLKVKDRTDIIFEVGDEQQLNSWMAELSECTGRGLESTEAEMHIPSALEPSTSSSPRGSTDSLNQGASPGGLLDPACQKTDHFLSCYPWFHGPISRVKAAQLVQLQGPDAHGVFLVRQSETRRGEYVLTFNFQGIAKHLRLSLTERGQCRVQHLHFPSVVDMLHHFQRSPIPLECGAACDVRLSSYVVVVSQPPGSCNTVLFPFSLPHWDSESLPHWGSELGLPHLSSSGCPRGLSPEGLPGRSSPPEQIFHLVPSPEELANSLQHLEHEPVNRARDSDYEMDSSSRSHLRAIDNQYTPL

SEQ ID NO: 108 - DNA, 3804 bp, Homo sapiens
taaagtcatcaaaacaacgttatatcctgtgtgaaatgctgcagtcaggatgccttgtggtttgagtgccttgatcatgtgccctaaggggatggtggcggtggtggtggccgtggatgacggagactctcaggccttggcaggtgcgtctttcagttcccctcacacttcgggttcctcggggaggaggggctggaaccctagcccatcgtcaggacaaagatgctcaggctgctcttggctctcaacttattcccttcaattcaagtaacaggaaacaagattttggtgaagcagtcgcccatgcttgtagcgtacgacaatgcggtcaaccttagctgcaagtattcctacaatctcttctcaagggagttccgggcatcccttcacaaaggactggatagtgctgtggaagtctgtgttgtatatgggaattactcccagcagcttcaggtttactcaaaaacggggttcaactgtgatgggaaattgggcaatgaatcagtgacattctacctccagaatttgtatgttaaccaaacagatatttacttctgcaaaattgaagttatgtatcctcctccttacctagacaatgagaagagcaatggaaccattatccatgtgaaagggaaacacctttgtccaagtcccctatttcccggaccttctaagcccttttgggtgctggtggtggttggtggagtcctggcttgctatagcttgctagtaacagtggcctttattattttctgggtgaggagtaagaggagcaggctcctgcacagtgactacatgaacatgactccccgccgccccgggcccacccgcaagcattaccagccctatgccccaccacgcgacttcgcagcctatcgctcctgacacggacgcctatccagaagccagccggctggcagcccccatctgctcaatatcactgctctggataggaaatgaccgccatctccagccggccacctcaggcccctgttgggccaccaatgccaatttttctcgagtgactagaccaaatatcaagatcattttgagactctgaaatgaagtaaaagagatttcctgtgacaggccaagtcttacagtgccatggcccacattccaacttaccatgtacttagtgacttgactgagaagttagggtagaaaacaaaaagggagtggattctgggagcctcttccctttctcactcacctgcacatctcagtcaagcaaagtgtggtatccacagacattttagttgcagaagaaaggctaggaaatcattccttttggttaaatgggtgtttaatcttttggttagtgggttaaacggggtaagttagagtagggggagggataggaagacatatttaaaaaccattaaaacactgtctcccactcatgaaatgagccacgtagttcctatttaatgctgttttcctttagtttagaaatacatagacattgtcttttatgaattctgatcatatttagtcattttgaccaaatgagggatttggtcaaatgagggattccctcaaagcaatatcaggtaaaccaagttgctttcctcactccctgtcatgagacttcagtgttaatgttcacaatatactttcgaaagaataaaatagttctcctacatgaagaaagaatatgtcaggaaataaggtcactttatgtcaaaattatttgagtactatgggacctggcgcagtggctcatgcttgtaatcccagcactttgggaggccgaggtgggcagatcacttgagatcaggaccagcctggtcaagatggtgaaactccgtctgtactaaaaatacaaaatttagcttggcctggtggcaggcacctgtaatcccagctgcccaggaggctgaggcatgagaatcgcttgaacctggcaggcggaggttgcagtgagccgagatagtgccacagctctccagcctgggcgacagagtgagactccatctcaaacaacaacaacaacaacaacaacaacaacaaaccacaaaattatttgagtactgtgaaggattatttgtctaacagttcattccaatcagaccaggtaggagctttcctgtttcatatgtttcagggttgcacagttggtctctttaatgtcggtgtggagatccaaagtgggttgtggaaagagcgtccataggagaagtgagaatactgtgaaaagggatgttagcattcattagagtatgaggatgagtcccaagaaggttctttggaaggaggacgaatagaatggagtaatgaaattcttgccatgtgctgaggagatagccagcattaggtgacaatcttccagaagtggtcaggcagaaggtgccctggtgagagctcctttacagggactttatgtggtttagggctcagagctccaaaactctgggctcagctgctcctgtaccttggaggtccattcacatgggaaagtattttggaatgtgtcttttgaagagagcatcagagttcttaagggactgggtaaggcctgaccctgaaatgaccatggatatttttctacctacagtttgagtcaactagaatatgcctggggaccttgaagaatgcccttcagtggccctcaccatttgttcatgcttcagttaattcaggtgttgaaggagcttaggttttagaggcacgtagacttggttcaagtctcgttagtagttgaatagcctcaggcaagtcactgcccacctaagatgatggttcttcaactataaatggagataatggttacaaatgtctcttcctatagtataatctccataagggcatggcccaagtctgtctttgactctgcctatccctgacgtttagtagcatgcccgacatacaatgttagctattggtattattgccatatagataaattatgtataaaaattaaactgggcaatagcctaagaaggggggaatattgtaacacaaatttaaacccactacgcagggatgaggtgctataatatgaggaccttttaacttccatcattttcctgtttcttgaaatagtttatcttgtaatgaaatataaggcacctcccacttttatgtatagaaagaggtcttttaatttttttttaatgtgagaaggaagggaggagtaggaatcttgagattccatatcgaaaatactgtactttggttgatttttaagtgggcttccattccatggatttaatcagtcccaagaagatcaaactcagcagtacttgggtgctgaagaactgttggatttaccctggcacgtgtgccacttgcccagcttcttgggcacacagagttcttcaatccaagttatcagattgtatttgaaaatgacagagctggagagttttttgaaatggcagtggcaaataaataaatacttttttttaaatggaaagacttgatctatggtaataaatgattttgttttctgactggaaaaataggcctactaaagatgaatcacacttgagatgtttcttactcactctgcacagaaacaaagaagaaatgttatacagggaagtccgttttcactattagtatgaaccaagaaatggttcaaaaacagtggtaggagcaatgctttcatagtttcagatatggtagttatgaagaaaacaatgtcatttgctgctattattgtaagagtcttataattaatggtactcctataatttttgattgtgagctcacctatttgggttaagcatgccaatttaaagagaccaagtgtatgtacattatgttctacatattcagtgataaaattactaaactact

SEQ ID NO: 109 - protein, 220 aa, Homo sapiens
MLRLLLALNLFPSIQVTGNKILVKQSPMLVAYDNAVNLSCKYSYNLFSREFRASLHKGLDSAVEVCVVYGNYSQQLQVYSKTGFNCDGKLGNESVTFYLQNLYVNQTDIYFCKIEVMYPPPYLDNEKSNGTIIHVKGKHLCPSPLFPGPSKPFWVLVVVGGVLACYSLLVTVAFIIFWVRSKRSRLLHSDYMNMTPRRPGPTRKHYQPYAPPRDFAAYRS

SEQ ID NO: 110 - DNA, 3260 bp, Homo sapiens
ccatcccatagtgagggaagacacgcggaaacaggcttgcacccagacacgacaccatgcatctcctcggcccctggctcctgctcctggttctagaatacttggctttctctgactcaagtaaatgggtttttgagcaccctgaaaccctctacgcctgggagggggcctgcgtctggatcccctgcacctacagagccctagatggtgacctggaaagcttcatcctgttccacaatcctgagtataacaagaacacctcgaagtttgatgggacaagactctatgaaagcacaaaggatgggaaggttccttctgagcagaaaagggtgcaattcctgggagacaagaataagaactgcacactgagtatccacccggtgcacctcaatgacagtggtcagctggggctgaggatggagtccaagactgagaaatggatggaacgaatacacctcaatgtctctgaaaggccttttccacctcatatccagctccctccagaaattcaagagtcccaggaagtcactctgacctgcttgctgaatttctcctgctatgggtatccgatccaattgcagtggctcctagagggggttccaatgaggcaggctgctgtcacctcgacctccttgaccatcaagtctgtcttcacccggagcgagctcaagttctccccacagtggagtcaccatgggaagattgtgacctgccagcttcaggatgcagatgggaagttcctctccaatgacacggtgcagctgaacgtgaagcacaccccgaagttggagatcaaggtcactcccagtgatgccatagtgagggagggggactctgtgaccatgacctgcgaggtcagcagcagcaacccggagtacacgacggtatcctggctcaaggatgggacctcgctgaagaagcagaatacattcacgctaaacctgcgcgaagtgaccaaggaccagagtgggaagtactgctgtcaggtctccaatgacgtgggcccgggaaggtcggaagaagtgttcctgcaagtgcagtatgccccggaaccttccacggttcagatcctccactcaccggctgtggagggaagtcaagtcgagtttctttgcatgtcactggccaatcctcttccaacaaattacacgtggtaccacaatgggaaagaaatgcagggaaggacagaggagaaagtccacatcccaaagatcctcccctggcacgctgggacttattcctgtgtggcagaaaacattcttggtactggacagaggggcccgggagctgagctggatgtccagtatcctcccaagaaggtgaccacagtgattcaaaaccccatgccgattcgagaaggagacacagtgaccctttcctgtaactacaattccagtaaccccagtgttacccggtatgaatggaaaccccatggcgcctgggaggagccatcgcttggggtgctgaagatccaaaacgttggctgggacaacacaaccatcgcctgcgcacgttgtaatagttggtgctcgtgggcctcccctgtcgccctgaatgtccagtatgccccccgagacgtgagggtccggaaaatcaagcccctttccgagattcactctggaaactcggtcagcctccaatgtgacttctcaagcagccaccccaaagaagtccagttcttctgggagaaaaatggcaggcttctggggaaagaaagccagctgaattttgactccatctccccagaagatgctgggagttacagctgctgggtgaacaactccataggacagacagcgtccaaggcctggacacttgaagtgctgtatgcacccaggaggctgcgtgtgtccatgagcccgggggaccaagtgatggaggggaagagtgcaaccctgacctgtgagagtgacgccaaccctcccgtctcccactacacctggtttgactggaataaccaaagcctcccccaccacagccagaagctgagattggagccggtgaaggtccagcactcgggtgcctactggtgccaggggaccaacagtgtgggcaagggccgttcgcctctcagcacccttactgtctactatagcccggagaccatcggcaggcgagtggctgtgggactcgggtcctgcctcgccatcctcatcctggcaatctgtgggctcaagctccagcgacgttggaagaggacacagagccagcaggggcttcaggagaattccagcggccagagcttctttgtgaggaataaaaaggttagaagggcccccctctctgaaggcccccactccctgggatgctacaatccaatgatggaagatggcattagctacaccaccctgcgctttcccgagatgaacataccacgaactggagatgcagagtcctcagagatgcagagacctccccggacctgcgatgacacggtcacttattcagcattgcacaagcgccaagtgggcgactatgagaacgtcattccagattttccagaagatgaggggattcattactcagagctgatccagtttggggtcggggagcggcctcaggcacaagaaaatgtggactatgtgatcctcaaacattgacactggatgggctgcagcagaggcactgggggcagcgggggccagggaagtccccgagtttccccagacaccgccacatggcttcctcctgcgtgcatgtgcgcacacacacacacacacgcacacacacacacacacactcactgcggagaaccttgtgcctggctcagagccagtctttttggtgagggtaaccccaaacctccaaaactcctgcccctgttctcttccactctccttgctacccagaaatcatctaaatacctgccctgacatgcacacctcccctgccccaccagcccactggccatctccacccggagctgctgtgtcctctggatctgctcgtcattttccttcccttctccatctctctggccctctacccctgatctgacatccccactcacgaatattatgcccagtttctgcctctgagggaaagcccagaaaaggacagaaacgaagtagaaaggggcccagtcctggcctggcttctcctttggaagtgaggcattgcacggggagacgtacgtatcagcggccccttgactctggggactccgggtttgagatggacacactggtgtggattaacctgccagggagacagagctcacaataaaaatggctcagatgccacttcaaagaaaaaaaaaa

SEQ ID NO: 111 - protein, 847 aa, Homo sapiens
MHLLGPWLLLLVLEYLAFSDSSKWVFEHPETLYAWEGACVWIPCTYRALDGDLESFILFHNPEYNKNTSKFDGTRLYESTKDGKVPSEQKRVQFLGDKNKNCTLSIHPVHLNDSGQLGLRMESKTEKWMERIHLNVSERPFPPHIQLPPEIQESQEVTLTCLLNFSCYGYPIQLQWLLEGVPMRQAAVTSTSLTIKSVFTRSELKFSPQWSHHGKIVTCQLQDADGKFLSNDTVQLNVKHTPKLEIKVTPSDAIVREGDSVTMTCEVSSSNPEYTTVSWLKDGTSLKKQNTFTLNLREVTKDQSGKYCCQVSNDVGPGRSEEVFLQVQYAPEPSTVQILHSPAVEGSQVEFLCMSLANPLPTNYTWYHNGKEMQGRTEEKVHIPKILPWHAGTYSCVAENILGTGQRGPGAELDVQYPPKKVTTVIQNPMPIREGDTVTLSCNYNSSNPSVTRYEWKPHGAWEEPSLGVLKIQNVGWDNTTIACARCNSWCSWASPVALNVQYAPRDVRVRKIKPLSEIHSGNSVSLQCDFSSSHPKEVQFFWEKNGRLLGKESQLNFDSISPEDAGSYSCWVNNSIGQTASKAWTLEVLYAPRRLRVSMSPGDQVMEGKSATLTCESDANPPVSHYTWFDWNNQSLPHHSQKLRLEPVKVQHSGAYWCQGTNSVGKGRSPLSTLTVYYSPETIGRRVAVGLGSCLAILILAICGLKLQRRWKRTQSQQGLQENSSGQSFFVRNKKVRRAPLSEGPHSLGCYNPMMEDGISYTTLRFPEMNIPRTGDAESSEMQRPPRTCDDTVTYSALHKRQVGDYENVIPDFPEDEGIHYSELIQFGVGERPQAQENVDYVILKH

SEQ ID NO: 112 - DNA, 1107 bp, Homo sapiens
tgctgcaactcaaactaaccaacccactgggagaagatgcctgggggtccaggagtcctccaagctctgcctgccaccatcttcctcctcttcctgctgtctgctgtctacctgggccctgggtgccaggccctgtggatgcacaaggtcccagcatcattgatggtgagcctgggggaagacgcccacttccaatgcccgcacaatagcagcaacaacgccaacgtcacctggtggcgcgtcctccatggcaactacacgtggccccctgagttcttgggcccgggcgaggaccccaatggtacgctgatcatccagaatgtgaacaagagccatgggggcatatacgtgtgccgggtccaggagggcaacgagtcataccagcagtcctgcggcacctacctccgcgtgcgccagccgccccccaggcccttcctggacatgggggagggcaccaagaaccgaatcatcacagccgaggggatcatcctcctgttctgcgcggtggtgcctgggacgctgctgctgttcaggaaacgatggcagaacgagaagctcgggttggatgccggggatgaatatgaagatgaaaacctttatgaaggcctgaacctggacgactgctccatgtatgaggacatctcccggggcctccagggcacctaccaggatgtgggcagcctcaacataggagatgtccagctggagaagccgtgacacccctactcctgccaggctgcccccgcctgctgtgcacccagctccagtgtctcagctcacttccctgggacattctcctttcagcccttctgggggcttccttagtcatattcccccagtggggggtgggagggtaacctcactcttctccaggccaggcctccttggactcccctgggggtgtcccactcttcttccctctaaactgccccacctcctaacctaatccccacgccccgctgcctttcccaggctcccctcacccagcgggtaatgagcccttaatcgctgcctctaggggagctgattgtagcagcctcgttagtgtcaccccctcctccctgatctgtcagggccacttagtgataataaattcttcccaactgc

SEQ ID NO: 113 - protein, 226 aa, Homo sapiens
MPGGPGVLQALPATIFLLFLLSAVYLGPGCQALWMHKVPASLMVSLGEDAHFQCPHNSSNNANVTWWRVLHGNYTWPPEFLGPGEDPNGTLIIQNVNKSHGGIYVCRVQEGNESYQQSCGTYLRVRQPPPRPFLDMGEGTKNRIITAEGIILLFCAVVPGTLLLFRKRWQNEKLGLDAGDEYEDENLYEGLNLDDCSMYEDISRGLQGTYQDVGSLNIGDVQLEKP

SEQ ID NO: 114 - DNA, 1270 bp, Homo sapiens
caggggacaggctgcagccggtgcagttacacgttttcctccaaggagcctcggacgttgtcacgggtttggggtcggggacagagcagtgaccatggccaggctggcgttgtctcctgtgcccagccactggatggtggcgttgctgctgctgctctcagctgagccagtaccagcagccagatcggaggaccggtaccggaatcccaaaggtagtgcttgttcgcggatctggcagagcccacgtttcatagccaggaaacggggcttcacggtgaaaatgcactgctacatgaacagcgcctccggcaatgtgagctggctctggaagcaggagatggacgagaatccccagcagctgaagctggaaaagggccgcatggaagagtcccagaacgaatctctcgccaccctcaccatccaaggcatccggtttgaggacaatggcatctacttctgtcagcagaagtgcaacaacacctcggaggtctaccagggctgcggcacagagctgcgagtcatgggattcagcaccttggcacagctgaagcagaggaacacgctgaaggatggtatcatcatgatccagacgctgctgatcatcctcttcatcatcgtgcctatcttcctgctgctggacaaggatgacagcaaggctggcatggaggaagatcacacctacgagggcctggacattgaccagacagccacctatgaggacatagtgacgctgcggacaggggaagtgaagtggtctgtaggtgagcacccaggccaggagtgagagccaggtcgccccatgacctgggtgcaggctccctggcctcagtgactgcttcggagctgcctggctcatggcccaacccctttcctggaccccccagctggcctctgaagctggcccaccagagctgccatttgtctccagcccctggtccccagctcttgccaaagggcctggagtagaaggacaacagggcagcaacttggagggagttctctggggatggacgggacccagccttctgggggtgctatgaggtgatccgtccccacacatgggatgggggaggcagagactggtccagagcccgcaaatggactcggagccgagggcctcccagcagagcttgggaagggccatggacccaactgggccccagaagagccacaggaacatcattcctctcccgcaaccactcccaccccagggaggccctggcctccagtgccttcccccgtggaataaacggtgtgtcctgagaaacca

SEQ ID NO: 115 - protein, 229 aa, Homo sapiens
MARLALSPVPSHWMVALLLLLSAEPVPAARSEDRYRNPKGSACSRIWQSPRFIARKRGFTVKMHCYMNSASGNVSWLWKQEMDENPQQLKLEKGRMEESQNESLATLTIQGIRFEDNGIYFCQQKCNNTSEVYQGCGTELRVMGFSTLAQLKQRNTLKDGIIMIQTLLIILFIIVPIFLLLDKDDSKAGMEEDHTYEGLDIDQTATYEDIVTLRTGEVKWSVGEHPGQE

SEQ ID NO: 116 - DNA, 1828 bp, Homo sapiens
acttctccctagagcaggggtgtttgccagcagcctgcactctcagaaatcagacttgagtggccggaacccttgagaccagaggcttaccatgctgctccctaggagggccaggaactgctgacgtgaccactggacagttattcgtgtctcttacaattaccaaacagaatggacaagcttaataaaataaccgtccccgccagtcagaagttgaggcagcttcaaaagatggtccatgatattaaaaacaatgaaggtggaataatgaataaaatcaaaaagctaaaagtcaaagcacctccaagtgttcctcgaagggactacgcttcagagagccctgctgacgaagaggagcagtggtccgatgactttgacagcgactatgaaaatccagatgagcactcggactcagagatgtacgtgatgcccgccgaggagaacgctgatgacagctacgagccgcctccagtagagcaggaaaccaggccggttcacccagccctgcccttcgccagaggcgagtatatagacaatcgatcaagccagaggcattccccacccttcagcaagacacttcccagtaagcccagctggccttcagagaaagcaaggctcacctccaccctgccggccctgactgctttgcagaaacctcaagtcccacccaaacccaaaggcctccttgaggatgaggctgattatgtggtccccgtggaagataatgatgaaaactatattcatcccacagaaagcagttcacctccacctgaaaaagctcccatggtgaatagatcaaccaagccaaattcctcaacgcccgcctctcctccaggaacagcttcaggtcgaaacagtggggcctgggaaaccaagtcacctccaccagctgcaccatccccgttgccacgggccgggaaaaaaccaacgacaccactgaagacaactccagttgcctctcaacagaatgcttcaagtgtttgtgaagaaaaacctatacctgctgaacgccaccgagggtcaagtcacagacaagaagctgtgcagtcaccagtgtttcctcctgcccagaaacaaatccaccaaaaacccatacctctgccaagatttacagaagggggaaacccaactgtggatgggcccctacccagcttttcatctaattccactatttcagaacaggaagctggcgttctctgcaagccatggtatgctggagcctgtgatcgaaagtctgctgaagaggcattgcacagatcaaacaaggatggatcatttcttattcggaaaagctctggccatgattccaaacaaccatatacactagttgtattctttaataagcgagtatataatattcctgtgcgatttattgaagcaacaaaacaatatgccttgggcagaaagaaaaatggtgaagagtactttggaagtgttgctgaaatcatcaggaatcatcaacatagtcctttggttcttattgacagtcagaataacacaaaagattccaccagactgaagtatgcagttaaagtttcataaagggggaaaaaaaagatcaataccattgcttcagacactttcccaaagtttctccttttgagaaaaagtcccaaaacttcatattttggattatgaatcatccagtaataaaatggaagatggagtcagctattgaagtggtcatccatttctttttaagaagctcatgtggacttgttctattgcctgacctgatgaactgttaatatctggtgaggttgagttatcatgctactaatattttccaaataaatatttttatttttaaaaataaaaaaaaaaaaaa

SEQ ID NO: 117 - protein, 456 aa, Homo sapiens
MDKLNKITVPASQKLRQLQKMVHDIKNNEGGIMNKIKKLKVKAPPSVPRRDYASESPADEEEQWSDDFDSDYENPDEHSDSEMYVMPAEENADDSYEPPPVEQETRPVHPALPFARGEYIDNRSSQRHSPPFSKTLPSKPSWPSEKARLTSTLPALTALQKPQVPPKPKGLLEDEADYVVPVEDNDENYIHPTESSSPPPEKAPMVNRSTKPNSSTPASPPGTASGRNSGAWETKSPPPAAPSPLPRAGKKPTTPLKTTPVASQQNASSVCEEKPIPAERHRGSSHRQEAVQSPVFPPAQKQIHQKPIPLPRFTEGGNPTVDGPLPSFSSNSTISEQEAGVLCKPWYAGACDRKSAEEALHRSNKDGSFLIRKSSGHDSKQPYTLVVFFNKRVYNIPVRFIEATKQYALGRKKNGEEYFGSVAEIIRNHQHSPLVLIDSQNNTKDSTRLKYAVKVS

SEQ ID NO: 118 - DNA, 1367 bp, Homo sapiens
ccggccggccgaagagttcacaagtgtgaagcctgaagccgccgggtgccgctgtgtagaaagaagctaaagcacttccagagcctgctgagctcagaggttcggaagacttatcgaccatggagcgcgcgtcctgcttgttgctgctgctgctgccgctggtgcacgtctctgcgaccacgccagaaccttgtgagctggacgatgaagatttccgctgcgtctgcaacttctccgaacctcagcccgactggtccgaagccttccagtgtgtgtctgcagtagaggtggagatccatgccggcggtctcaacctagagccgtttctaaagcgcgtcgatgcggacgccgacccgcggcagtatgctgacacggtcaaggctctccgcgtgcggcggctcacagtgggagccgcacaggttcctgctcagctactggtaggcgccctgcgtgtgctagcgtactcccgcctcaaggaactgacgctcgaggacctaaagataaccggcaccatgcctccgctgcctctggaagccacaggacttgcactttccagcttgcgcctacgcaacgtgtcgtgggcgacagggcgttcttggctcgccgagctgcagcagtggctcaagccaggcctcaaggtactgagcattgcccaagcacactcgcctgccttttcctgcgaacaggttcgcgccttcccggcccttaccagcctagacctgtctgacaatcctggactgggcgaacgcggactgatggcggctctctgtccccacaagttcccggccatccagaatctagcgctgcgcaacacaggaatggagacgcccacaggcgtgtgcgccgcactggcggcggcaggtgtgcagccccacagcctagacctcagccacaactcgctgcgcgccaccgtaaaccctagcgctccgagatgcatgtggtccagcgccctgaactccctcaatctgtcgttcgctgggctggaacaggtgcctaaaggactgccagccaagctcagagtgctcgatctcagctgcaacagactgaacagggcgccgcagcctgacgagctgcccgaggtggataacctgacactggacgggaatcccttcctggtccctggaactgccctcccccacgagggctcaatgaactccggcgtggtcccagcctgtgcacgttcgaccctgtcggtgggggtgtcgggaaccctggtgctgctccaaggggcccggggctttgcctaagatccaagacagaataatgaatggactcaaactgccttggcttcaggggagtcccgtcaggacgttgaggacttttcgaccaattcaaccctttgccccacctttattaaaatcttaaac

SEQ ID NO: 119 - protein, 375 aa, Homo sapiens
MERASCLLLLLLPLVHVSATTPEPCELDDEDFRCVCNFSEPQPDWSEAFQCVSAVEVEIHAGGLNLEPFLKRVDADADPRQYADTVKALRVRRLTVGAAQVPAQLLVGALRVLAYSRLKELTLEDLKITGTMPPLPLEATGLALSSLRLRNVSWATGRSWLAELQQWLKPGLKVLSIAQAHSPAFSCEQVRAFPALTSLDLSDNPGLGERGLMAALCPHKFPAIQNLALRNTGMETPTGVCAALAAAGVQPHSLDLSHNSLRATVNPSAPRCMWSSALNSLNLSFAGLEQVPKGLPAKLRVLDLSCNRLNRAPQPDELPEVDNLTLDGNPFLVPGTALPHEGSMNSGVVPACARSTLSVGVSGTLVLLQGARGFA

SEQ ID NO: 120 - DNA, 2960 bp, Homo sapiens
gaattcgaggatccgggtaccatggcgcgtgaacgcagctcggctgccgctggcaggaaacaattctgcaaaaataatcatactcagcctggcaattgtctgcccctaggtctgtcgctcagccgccgtccacactcgctgcaggggggggggcacagaatttaccgcggcaagaacatccctcccagccagcagattacaatgctgcaaactaaggatctcatctggactttgtttttcctgggaactgcagtttctctgcaggtggatattgttcccagccagggggagatcagcgttggagagtccaaattcttcttatgccaagtggcaggagatgccaaagataaagacatctcctggttctcccccaatggagaaaagctcaccccaaaccagcagcggatctcagtggtgtggaatgatgattcctcctccaccctcaccatctataacgccaacatcgacgacgccggcatttacaagtgtgtggttacaggcgaggatggcagtgagtcagaggccaccgtcaacgtgaagatctttcagaagctcatgttcaagaatgcgccaaccccacaggagttccgggagggggaagatgccgtgattgtgtgtgatgtggtcagctccctcccaccaaccatcatctggaaacacaaaggccgagatgtcatcctgaaaaaagatgtccgattcatagtcctgtccaacaactacctgcagatccggggcatcaagaaaacagatgagggcacttatcgctgtgagggcagaatcctggcacggggggagatcaacttcaaggacattcaggtcattgtgaatgtgccacctaccatccaggccaggcagaatattgtgaatgccaccgccaacctcggccagtccgtcaccctggtgtgcgatgccgaaggcttcccagagcccaccatgagctggacaaaggatggggaacagatagagcaagaggaagacgatgagaagtacatcttcagcgacgatagttcccagctgaccatcaaaaaggtggataagaacgacgaggctgagtacatctgcattgctgagaacaaggctggcgagcaggatgcgaccatccacctcaaagtctttgcaaaacccaaaatcacatatgtagagaaccagactgccatggaattagaggagcaggtcactcttacctgtgaagcctccggagaccccattccctccatcacctggaggacttctacccggaacatcagcagcgaagaaaagactctggatgggcacatggtggtgcgtagccatgcccgtgtgtcgtcgctgaccctgaagagcatccagtacactgatgccggagagtacatctgcaccgccagcaacaccatcggccaggactcccagtccatgtaccttgaagtgcaatatgccccaaagctacagggccctgtggctgtgtacacttgggaggggaaccaggtgaacatcacctgcgaggtatttgcctatcccagtgccacgatctcatggtttcgggatggccagctgctgccaagctccaattacagcaatatcaagatctacaacaccccctctgccagctatctggaggtgaccccagactctgagaatgattttgggaactacaactgtactgcagtgaaccgcattgggcaggagtccttggaattcatccttgttcaagcagacaccccctcttcaccatccatcgaccaggtggagccatactccagcacagcccaggtgcagtttgatgaaccagaggccacaggtggggtgcccatcctcaaatacaaagctgagtggagagcagttggtgaagaagtatggcattccaagtggtatgatgccaaggaagccagcatggagggcatcgtcaccatcgtgggcctgaagcccgaaacaacgtacgccgtaaggctggcggcgctcaatggcaaagggctgggtgagatcagcgcggcctccgagttcaagacgcagccagtccaaggggaacccagtgcacctaagctcgaagggcagatgggagaggatggaaactctattaaagtgaacctgatcaagcaggatgacggcggctcccccatcagacactatctggtcaggtaccgagcgctctcctccgagtggaaaccagagatcaggctcccgtctggcagtgaccacgtcatgctgaagtccctggactggaatgctgagtatgaggtctacgtggtggctgagaaccagcaaggaaaatccaaggcggctcattttgtgttcaggacctcggcccagcccacagccatcccagccaacggcagccccacctcaggcctgagcaccggggccatcgtgggcatcctcatcgtcatcttcgtcctgctcctggtggttgtggacatcacctgctacttcctgaacaagtgtggcctgttcatgtgcattgcggtcaacctgtgtggaaaagccgggcccggggccaagggcaaggacatggaggagggcaaggccgccttctcgaaagatgagtccaaggagcccatcgtggaggttcgaacggaggaggagaggaccccaaaccatgatggagggaaacacacagagcccaacgagaccacgccactgacggagcccgagaagggccccgtagaagcaaagccagagtgccaggagacagaaacgaagccagcgccagccgaagtcaagacggtccccaatgacgccacacagacaaaggagaacgagagcaaagcatgatgggtgaagagaaccgagcaaagatcaaaataaaaagtgacacagcagcttcaccagagcatttccaacaccacagacacacacacgcacacacacacacaattctaggctagtttctggtcttatcattgagttacagcttagtgatgattttaagacaaaacaaacaaacaaaaaaaaaaaaaaaccatggtacccggatcctcgaattc

SEQ ID NO: 121 - protein, 848 aa, Homo sapiens
MLQTKDLIWTLFFLGTAVSLQVDIVPSQGEISVGESKFFLCQVAGDAKDKDISWFSPNGEKLTPNQQRISVVWNDDSSSTLTIYNANIDDAGIYKCVVTGEDGSESEATVNVKIFQKLMFKNAPTPQEFREGEDAVIVCDVVSSLPPTIIWKHKGRDVILKKDVRFIVLSNNYLQIRGIKKTDEGTYRCEGRILARGEINFKDIQVIVNVPPTIQARQNIVNATANLGQSVTLVCDAEGFPEPTMSWTKDGEQIEQEEDDEKYIFSDDSSQLTIKKVDKNDEAEYICIAENKAGEQDATIHLKVFAKPKITYVENQTAMELEEQVTLTCEASGDPIPSITWRTSTRNISSEEKTLDGHMVVRSHARVSSLTLKSIQYTDAGEYICTASNTIGQDSQSMYLEVQYAPKLQGPVAVYTWEGNQVNITCEVFAYPSATISWFRDGQLLPSSNYSNIKIYNTPSASYLEVTPDSENDFGNYNCTAVNRIGQESLEFILVQADTPSSPSIDQVEPYSSTAQVQFDEPEATGGVPILKYKAEWRAVGEEVWHSKWYDAKEASMEGIVTIVGLKPETTYAVRLAALNGKGLGEISAASEFKTQPVQGEPSAPKLEGQMGEDGNSIKVNLIKQDDGGSPIRHYLVRYRALSSEWKPEIRLPSGSDHVMLKSLDWNAEYEVYVVAENQQGKSKAAHFVFRTSAQPTAIPANGSPTSGLSTGAIVGILIVIFVLLLVVVDITCYFLNKCGLFMCIAVNLCGKAGPGAKGKDMEEGKAAFSKDESKEPIVEVRTEEERTPNHDGGKHTEPNETTPLTEPEKGPVEAKPECQETETKPAPAEVKTVPNDATQTKENESKA

SEQ ID NO: 122 - DNA, 1364 bp, Homo sapiens
ctgtattgtggttcctggaacactttagaggcttgtgattctactgcttcttattcacactataatacatgtctcaccaatagatgattcaagaacatcatttaaatacacaatttttcattctctatttttgctaaatttcttcatactcaactttcagattctttaatctccagctcagcttcaacaattcaacgctgttctttctgaaaaagtacacatcgtgccttctctacttcgctcttggaacataatttctcatggcagtgtttaagaccactctgtggaggttaatttctgggaccttagggataatatgcctttcgttgatggctacgttgggaattttgttgaaaaattcttttactaaactgagtattgagccagcatttactccaggacccaacatagaactccagaaagactctgactgctgttcttgccaagaaaaatgggttgggtaccggtgcaactgttacttcatttccagtgaacagaaaacttggaacgaaagtcggcatctctgtgcttctcagaaatccagcctgcttcagcttcaaaacacagatgaactggattttatgagctccagtcaacaattttactggattggactctcttacagtgaggagcacaccgcctggttgtgggagaatggctctgcactctcccagtatctatttccatcatttgaaacttttaatacaaagaactgcatagcgtataatccaaatggaaatgctttagatgaatcctgtgaagataaaaatcgttatatctgtaagcaacagctcatttaaatgtttcttggggcagagaaggtggagagtaaagacccaacattactaacaatgatacagttgcatgttatattattactaattgtctacttctggagtctataaaatgtttttaaacagtgtcatatacaattgtcatgtatgtgaaacaatgtgttttaaaattgatgaaattcgttcacctacatttgagaattataaaattaacataaagaattttgtattttcatttaatgtatataatgttaaattcaatgtagttttattacacatttatgtaattttatttacattcttgctaattctcagcagaaatttaaataagatttaattcacatcaaataaaatttagaaaataaaatttaactcacactgcccaggctggagcatagtggcaagatcatagctcattgcaagctcaagtgatcctcctgactcagcctcccaagtagctaggactgcaggcaccatgtcactatgcccgactaatttttaatttttaattttttgtcaagacaaggtcttgctatgttgcccaggctggtcttgaactcctggcctcaa

SEQ ID NO: 123 - protein, 179 aa, Homo sapiens
MAVFKTTLWRLISGTLGIICLSLMATLGILLKNSFTKLSIEPAFTPGPNIELQKDSDCCSCQEKWVGYRCNCYFISSEQKTWNESRHLCASQKSSLLQLQNTDELDFMSSSQQFYWIGLSYSEEHTAWLWENGSALSQYLFPSFETFNTKNCIAYNPNGNALDESCEDKNRYICKQQLI

SEQ ID NO: 124 - DNA, 2406 bp, Homo sapiens
gattctgtgtgtgtcctcagatgctcagccacagacctttgagggagtaaagggggcagacccacccaccttgcctccaggctctttccttcctggtcctgttctatggtggggctcccttgccagacttcagactgagaagtcagatgaagtttcaagaaaaggaaattggtgggtgacagagatgggtggaggggctggggaaaggctgtttacttcctcctgtctagtcggtttggtccctttagggctccggatatctttggtgacttgtccactccagtgtggcatcatgtggcagctgctcctcccaactgctctgctacttctagtttcagctggcatgcggactgaagatctcccaaaggctgtggtgttcctggagcctcaatggtacagggtgctcgagaaggacagtgtgactctgaagtgccagggagcctactcccctgaggacaattccacacagtggtttcacaatgagagcctcatctcaagccaggcctcgagctacttcattgacgctgccacagtcgacgacagtggagagtacaggtgccagacaaacctctccaccctcagtgacccggtgcagctagaagtccatatcggctggctgttgctccaggcccctcggtgggtgttcaaggaggaagaccctattcacctgaggtgtcacagctggaagaacactgctctgcataaggtcacatatttacagaatggcaaaggcaggaagtattttcatcataattctgacttctacattccaaaagccacactcaaagacagcggctcctacttctgcagggggctttttgggagtaaaaatgtgtcttcagagactgtgaacatcaccatcactcaaggtttggcagtgtcaaccatctcatcattctttccacctgggtaccaagtctctttctgcttggtgatggtactcctttttgcagtggacacaggactatatttctctgtgaagacaaacattcgaagctcaacaagagactggaaggaccataaatttaaatggagaaaggaccctcaagacaaatgacccccatcccatgggggtaataagagcagtagcagcagcatctctgaacatttctctggatttgcaaccccatcatcctcaggcctctctacaagcagcaggaaacatagaactcagagccagatcccttatccaactctcgacttttccttggtctccagtggaagggaaaagcccatgatcttcaagcagggaagccccagtgagtagctgcattcctagaaattgaagtttcagagctacacaaacactttttctgtcccaaccgttccctcacagcaaagcaacaatacaggctagggatggtaatcctttaaacatacaaaaattgctcgtgttataaattacccagtttagaggggaaaaaaaaacaattattcctaaataaatggataagtagaattaatggttgaggcaggaccatacagagtgtgggaactgctggggatctagggaattcagtgggaccaatgaaagcatggctgagaaatagcaggtagtccaggatagtctaagggaggtgttcccatctgagcccagagataagggtgtcttcctagaacattagccgtagtggaattaacaggaaatcatgagggtgacgtagaattgagtcttccaggggactctatcagaactggaccatctccaagtatataacgatgagtcctcttaatgctaggagtagaaaatggtcctaggaaggggactgaggattgcggtggggggtggggtggaaaagaaagtacagaacaaaccctgtgtcactgtcccaagttgctaagtgaacagaactatctcagcatcagaatgagaaagcctgagaagaaagaaccaaccacaagcacacaggaaggaaagcgcaggaggtgaaaatgctttcttggccagggtagtaagaattagaggttaatgcagggactgtaaaaccaccttttctgcttcaatatctaattcctgtgtagctttgttcattgcatttattaaacaaatgttgtataaccaatactaaatgtactactgagcttcgctgagttaagttatgaaactttcaaatccttcatcatgtcagttccaatgaggtggggatggagaagacaattgttgcttatgaaagaaagctttagctgtctctgttttgtaagctttaagcgcaacatttcttggttccaataaagcattttacaagatcttgcatgctactcttagatagaagatgggaaaaccatggtaataaaatatgaatgataaaaaaaaaaaaaaaaaaaaaaaaaaaaaaaaaaaaaaaaaaaaaaaaaaaaaaaaaaaaaaaaaaaaaaaaaaaaaaaaaaaaaaaaaaaaaaaaaaaa

SEQ ID NO: 125 - protein, 290 aa, Homo sapiens
MGGGAGERLFTSSCLVGLVPLGLRISLVTCPLQCGIMWQLLLPTALLLLVSAGMRTEDLPKAVVFLEPQWYRVLEKDSVTLKCQGAYSPEDNSTQWFHNESLISSQASSYFIDAATVDDSGEYRCQTNLSTLSDPVQLEVHIGWLLLQAPRWVFKEEDPIHLRCHSWKNTALHKVTYLQNGKGRKYFHHNSDFYIPKATLKDSGSYFCRGLFGSKNVSSETVNITITQGLAVSTISSFFPPGYQVSFCLVMVLLFAVDTGLYFSVKTNIRSSTRDWKDHKFKWRKDPQDK

SEQ ID NO: 126 - DNA, 1559 bp, Homo sapiens
ccccagtctgagaacaagaaagaagaacttctgtctcgagggtctcactgtcaaccaggccagagtgcagtgaagatcatacctcactacatccgtgaactcccgggctcctcccacctaagtctcttgagtagctgggacttcaggagactgaagccaaggataccagcagagccaacatttgcttcaagttcctgggcctgctgacagcgtgcaggatgctgttggaacccggcagaggctgctgtgccctggccatcctgctggcaattgtggacatccagtctggtggatgcattaacatcaccagctcagcttcccaggaaggaacgcgactaaacttaatctgtactgtatggcataagaaagaagaggctgaggggtttgtagtgtttttgtgcaaggacaggtctggagactgttctcctgagaccagtttaaaacagctgagacttaaaagggatcctgggatagatggtgttggtgaaatatcatctcagttgatgttcaccataagccaagtcacaccgttgcacagtgggacctaccagtgttgtgccagaagccagaagtcaggtatccgccttcagggccattttttctccattctattcacagagacagggaactacacagtgacgggattgaaacaaagacaacaccttgagttcagccataatgaaggcactctcagttcaggcttcctacaagaaaaggtctgggtaatgctggtcaccagccttgtggcccttcaagctttgtaagccttgtgccaaaagaaacttttaaaacagctacagcaagatgagtctgactatggcttagtatctttctcattacaataggcacagagaagaatgcaacagggcacaggggaagagatgctaaatataccaagaatctgtggaaatataagctggggcaaatcagtgtaatccttgactttgctcctcaccatcagggcaaacttgccttcttccctcctaagctccagtaaataaacagaacagctttcaccaaagtgggtagtatagtcctcaaatatcggataaatatatgcgtttttgtaccccagaaaaacttttcctccctcttcatcaacatagtaaaataagtcaaacaaaatgagaacaccaaattttgggggaataaatttttatttaacactgcaaaggaaagagagagaaaacaagcaaagataggtaggacagaaaggaagacagccagatccagtgattgacttggcatgaaaatgagaaaatgcagacagacctcaacattcaacaacatccatacagcactgctggaggaagaggaagatttgtgcagaccaagagcaccacagactacaactgcccagcttcatctaaatacttgttaacctctttggtcatttctctttttaaataaatgcccatagcagtatttggagtattttcttttctcctaaatccacaaactctcttctttctctttggacagatgacctcttgtcatagttaagcagagagtgggcaggatattcctgataggaggaactacatgaataaaggggtaag

SEQ ID NO: 127 - protein, 181 aa, Homo sapiens
MLLEPGRGCCALAILLAIVDIQSGGCINITSSASQEGTRLNLICTVWHKKEEAEGFVVFLCKDRSGDCSPETSLKQLRLKRDPGIDGVGEISSQLMFTISQVTPLHSGTYQCCARSQKSGIRLQGHFFSILFTETGNYTVTGLKQRQHLEFSHNEGTLSSGFLQEKVWVMLVTSLVALQAL

SEQ ID NO: 128 - DNA, 3316 bp, Homo sapiens
gtaggggtaggagggggccggcggagtttccctccccgcccagcggccctgggcgggcttttcggctgcttctcataagcaggtggtttcgtttctccggcacaggtaggtttctctggcaccgattcggggcctgcccggacttcgccgcacgctgcagaacctcgcccagcgcccaccatgccccggcagctcagcgcggcggccgcgctcttcgcgtccctggccgtaattttgcacgatggcagtcaaatgagagcaaaagcatttccagaaaccagagattattctcaacctactgcagcagcaacagtacaggacataaaaaaacctgtccagcaaccagctaagcaagcacctcaccaaactttagcagcaagattcatggatggtcatatcacctttcaaacagcggccacagtaaaaattccaacaactaccccagcaactacaaaaaacactgcaaccaccagcccaattacctacaccctggtcacaacccaggccacacccaacaactcacacacagctcctccagttactgaagttacagtcggccctagcttagccccttattcactgccacccaccatcaccccaccagctcatacaactggaaccagttcatcaaccgtcagccacacaactgggaacaccactcaacccagtaaccagaccacccttccagcaactttatcgatagcactgcacaaaagcacaaccggtcagaagcctgttcaacccacccatgccccaggaacaacggcagctgcccacaataccacccgcacagctgcacctgcctccacggttcctgggcccacccttgcacctcagccatcgtcagtcaagactggaatttatcaggttctaaacggaagcagactctgtataaaagcagagatggggatacagctgattgttcaagacaaggagtcggttttttcacctcggagatacttcaacatcgaccccaacgcaacgcaagcctctgggaactgtggcacccgaaaatccaaccttctgttgaattttcagggcggatttgtgaatctcacatttaccaaggatgaagaatcatattatatcagtgaagtgggagcctatttgaccgtctcagatccagagacaatttaccaaggaatcaaacatgcggtggtgatgttccagacagcagtcgggcattccttcaagtgcgtgagtgaacagagcctccagttgtcagcccacctgcaggtgaaaacaaccgatgtccaacttcaagcctttgattttgaagatgaccactttggaaatgtggatgagtgctcgtctgactacacaattgtgcttcctgtgattggggccatcgtggttggtctctgccttatgggtatgggtgtctataaaatccgcctaaggtgtcaatcatctggataccagagaatctaattgttgcccggggggaatgaaaataatggaatttagagaactctttcatcccttccaggatggatgttgggaaattccctcagagtgtgggtccttcaaacaatgtaaaccaccatcttctattcaaatgaagtgagtcatgtgtgatttaagttcaggcagcacatcaatttctaaatactttttgtttattttatgaaagatatagtgagctgtttattttctagtttcctttagaatattttagccactcaaagtcaacatttgagatatgttgaattaacataatatatgtaaagtagaataagccttcaaattataaaccaagggtcaattgtaactaatactactgtgtgtgcattgaagattttattttacccttgatcttaacaaagcctttgctttgttatcaaatggactttcagtgcttttactatctgtgttttatggtttcatgtaacatacatattcctggtgtagcacttaactccttttccactttaaatttgtttttgttttttgagacggagtttcactcttgtcacccaggctggagtacagtggcacgatctcggcttatggcaacctccgcctcccgggttcaagtgattctcctgcttcagcttcccgagtagctgggattacaggcacacactaccacgcctggctaatttttgtatttttattatagacggggtttcaccatgttggccagactggtcttgaactcttgacctcaggtgatccacccacctcagcctcccaaagtgctgggattacaggcatgagccattgcgcccggccttaaatgttttttttaatcatcaaaaagaacaacatatctcaggttgtctaagtgtttttatgtaaaaccaacaaaaagaacaaatcagcttatattttttatcttgatgactcctgctccagaatcgctagactaagaattaggtggctacagatggtagaactaaacaataagcaagagacaataataatggcccttaattattaacaaagtgccagagtctaggctaagcactttatctatatctcatttcattctcacaacttataggtgaatgagtaaactgagacttaagggaactgaatcacttaaatgtcacctggctaactgatggcagagccagagcttgaattcatgttggtctgacatcaaggtctttggtcttctccctacaccaagttacctacaagaacaatgacaccacactctgcctgaaggctcacacctcataccagcatacgctcaccttacagggaaatgggtttatccaggatcatgagacattagggtagatgaaaggagagctttgcagataacaaaatagcctatccttaataaatcctccactctctggaaggagactgaggggctttgtaaaacattagtcagttgctcatttttatgggattgcttagctgggctgtaaagatgaaggcatcaaataaactcaaagtatttttaaatttttttgataatagagaaacttcgctaaccaactgttctttcttgagtgtatagccccatcttgtggtaacttgctgcttctgcacttcatatccatatttcctattgttcactttattctgtagagcagcctgccaagaattttatttctgctgttttttttgctgctaaagaaaggaactaagtcaggatgttaacagaaaagtccacataaccctagaattcttagtcaaggaataattcaagtcagcctagagaccatgttgactttcctcatgtgtttccttatgactcagtaagttggcaaggtcctgactttagtcttaataaaacattgaattgtagtaaaggtttttgtaataaaaacttactttggaaaaaaaaaaaaaaaaaaaa

SEQ ID NO: 129 - protein, 416 aa, Homo sapiens
MPRQLSAAAALFASLAVILHDGSQMRAKAFPETRDYSQPTAAATVQDIKKPVQQPAKQAPHQTLAARFMDGHITFQTAATVKIPTTTPATTKNTATTSPITYTLVTTQATPNNSHTAPPVTEVTVGPSLAPYSLPPTITPPAHTTGTSSSTVSHTTGNTTQPSNQTTLPATLSIALHKSTTGQKPVQPTHAPGTTAAAHNTTRTAAPASTVPGPTLAPQPSSVKTGIYQVLNGSRLCIKAEMGIQLIVQDKESVFSPRRYFNIDPNATQASGNCGTRKSNLLLNFQGGFVNLTFTKDEESYYISEVGAYLTVSDPETIYQGIKHAVVMFQTAVGHSFKCVSEQSLQLSAHLQVKTTDVQLQAFDFEDDHFGNVDECSSDYTIVLPVIGAIVVGLCLMGMGVYKIRLRCQSSGYQRI

SEQ ID NO: 130 - DNA, 1314 bp, Homo sapiens
cagtgattctcgtgcctcagcctcctgagtagccgaaattacagacgtgtgccaccatgcttggctaattttttggatttttagtagagatggggtttcactatgttggccaggctagtcttgaactcctggcctgaagcaatccgcccacctcagcctcccaaagtgctgagattataggcacgagccactacacctggccacaaaattctttaaagaagccaatcccatcctccctcaagagccaaggggccacctcaccctcttgttacagcagatcctgcctcccacagtcaccctgctcccaagtgcaacctctgtctgaccctgcatggtgtgcggtgccctcctgcctcaggccgcgaagaaggatctaagggcttggcttgtttgaaagaaccacaccccgaaagtaacatctttggagaaagtgatacaagagcttctgcacccacctgatagaggaagtccaaagggtgtgcgcacacacaatggtgcctgaagaagagcctcaagaccgagagaaaggactctggtggttccagttgaaggtctggtccatggcagtcgtatccatcttgctcctcagtgtctgtttcactgtgagttctgtggtgcctcacaattttatgtatagcaaaactgtcaagaggctgtccaagttacgagagtatcaacagtatcatccaagcctgacctgcgtcatggaaggaaaggacatagaagattggagctgctgcccaaccccttggacttcatttcagtctagttgctactttatttctactgggatgcaatcttggactaagagtcaaaagaactgttctgtgatgggggctgatctggtggtgatcaacaccagggaagaacaggatttcatcattcagaatctgaaaagaaattcttcttattttctggggctgtcagatccagggggtcggcgacattggcaatgggttgaccagacaccatacaatgaaaatgtcacattctggcactcaggtgaacccaataaccttgatgagcgttgtgcgataataaatttccgttcttcagaagaatggggctggaatgacattcactgtcatgtacctcagaagtcaatttgcaagatgaagaagatctacatataaatgaaatattctccctggaaatgtgtttgggttggcatccaccgttgtagaaagctaaattgattttttaatttatgtgtaagttttgtacaaggaatgcccctaaaatgtttcagcaggctgtcacctattacacttatgatataatccattcacacattcatttattcatttattcatt

SEQ ID NO: 131 - protein, 213 aa, Homo sapiens
MVPEEEPQDREKGLWWFQLKVWSMAVVSILLLSVCFTVSSVVPHNFMYSKTVKRLSKLREYQQYHPSLTCVMEGKDIEDWSCCPTPWTSFQSSCYFISTGMQSWTKSQKNCSVMGADLVVINTREEQDFIIQNLKRNSSYFLGLSDPGGRRHWQWVDQTPYNENVTFWHSGEPNNLDERCAIINFRSSEEWGWNDIHCHVPQKSICKMKKIYI

SEQ ID NO: 132 - DNA, 1221 bp, Homo sapiens
cagtgattctcgtgcctcagcctcctgagtagccgaaattacagacgtgtgccaccatgcttggctaattttttggatttttagtagagatggggtttcactatgttggccaggctagtcttgaactcctggcctgaagcaatccgcccacctcagcctcccaaagtgctgagattataggcacgagccactacacctggccacaaaattctttaaagaagccaatcccatcctccctcaagagccaaggggccacctcaccctcttgttacagcagatcctgcctcccacagtcaccctgctcccaagtgcaacctctgtctgaccctgcatggtgtgcggtgccctcctgcctcaggccgcgaagaaggatctaagggcttggcttgtttgaaagaaccacaccccgaaagtaacatctttggagaaagtgatacaagagcttctgcacccacctgatagaggaagtccaaagggtgtgcgcacacacaatggtgcctgaagaagagcctcaagaccgagtgcctcacaattttatgtatagcaaaactgtcaagaggctgtccaagttacgagagtatcaacagtatcatccaagcctgacctgcgtcatggaaggaaaggacatagaagattggagctgctgcccaaccccttggacttcatttcagtctagttgctactttatttctactgggatgcaatcttggactaagagtcaaaagaactgttctgtgatgggggctgatctggtggtgatcaacaccagggaagaacaggatttcatcattcagaatctgaaaagaaattcttcttattttctggggctgtcagatccagggggtcggcgacattggcaatgggttgaccagacaccatacaatgaaaatgtcacattctggcactcaggtgaacccaataaccttgatgagcgttgtgcgataataaatttccgttcttcagaagaatggggctggaatgacattcactgtcatgtacctcagaagtcaatttgcaagatgaagaagatctacatataaatgaaatattctccctggaaatgtgtttgggttggcatccaccgttgtagaaagctaaattgattttttaatttatgtgtaagttttgtacaaggaatgcccctaaaatgtttcagcaggctgtcacctattacacttatgatataatccattcacacattcatttattcatttattcatt

SEQ ID NO: 133 - protein, 182 aa, Homo sapiens
MVPEEEPQDRVPHNFMYSKTVKRLSKLREYQQYHPSLTCVMEGKDIEDWSCCPTPWTSFQSSCYFISTGMQSWTKSQKNCSVMGADLVVINTREEQDFIIQNLKRNSSYFLGLSDPGGRRHWQWVDQTPYNENVTFWHSGEPNNLDERCAIINFRSSEEWGWNDIHCHVPQKSICKMKKIYI

SEQ ID NO: 134 - DNA, 2574 bp, Homo sapiens
cctggcgcagccgcagcagcgacgcgagcgaactcggccgggcccgggcgcgcgggggcgggacgcgcacgcggcgagggcggcgggtgagccgggggcggggacgggggcgggacgggggcgaagggggcggggacgggggcgcccgccggcctaacgggattaggagggcgcgccacccgcttccgctgcccgccggggaatcccccgggtggcgcccagggaagttcccgaacgggcgggcataaaagggcagccgcgccggcgccccacagctctgcagctcgtggcagcggcgcagcgctccagccatgtcgcgcggcctccagcttctgctcctgagctgcgcctacagcctggctcccgcgacgccggaggtgaaggtggcttgctccgaagatgtggacttgccctgcaccgccccctgggatccgcaggttccctacacggtctcctgggtcaagttattggagggtggtgaagagaggatggagacaccccaggaagaccacctcaggggacagcactatcatcagaaggggcaaaatggttctttcgacgcccccaatgaaaggccctattccctgaagatccgaaacactaccagctgcaactcggggacatacaggtgcactctgcaggacccggatgggcagagaaacctaagtggcaaggtgatcttgagagtgacaggatgccctgcacagcgtaaagaagagacttttaagaaatacagagcggagattgtcctgctgctggctctggttattttctacttaacactcatcattttcacttgtaagtttgcacggctacagagtatcttcccagatttttctaaagctggcatggaacgagcttttctcccagttacctccccaaataagcatttagggctagtgactcctcacaagacagaactggtatgagcaggatttctgcaggttcttcttcctgaagctgaggctcaggggtgtgcctgtctgttacactggaggagagaagaatgagcctacgctgaagatggcatcctgtgaagtccttcacctcactgaaaacatctggaaggggatcccaccccattttctgtgggcaggcctcgaaaaccatcacatgaccacatagcatgaggccactgctgcttctccatggccaccttttcagcgatgtatgcagctatctggtcaacctcctggacattttttcagtcatataaaagctatggtgagatgcagctggaaaagggtcttgggaaatatgaatgcccccagctggcccgtgacagactcctgaggacagctgtcctcttctgcatcttggggacatctctttgaattttctgtgttttgctgtaccagcccagatgttttacgtctgggagaaattgacagatcaagctgtgagacagtgggaaatatttagcaaataatttcctggtgtgaaggtcctgctattactaaggagtaatctgtgtacaaagaaataacaagtcgatgaactattccccagcagggtcttttcatctgggaaagacatccataaagaagcaataaagaagagtgccacatttatttttatatctatatgtacttgtcaaagaaggtttgtgtttttctgcttttgaaatctgtatctgtagtgagatagcattgtgaactgacaggcagcctggacatagagagggagaagaagtcagagagggtgacaagatagagagctatttaatggccggctggaaatgctgggctgacggtgcagtctgggtgctcgcccacttgtcccactatctgggtgcatgatcttgagcaagttccttctggtgtctgctttctccattgtaaaccacaaggctgttgcatgggctaatgaagatcatatacgtgaaaattatttgaaaacatataaagcactatacagattcgaaactccattgagtcattatccttgctatgatgatggtgttttggggatgagagggtgctatccatttctcatgttttccattgtttgaaacaaagaaggttaccaagaagcctttcctgtagccttctgtaggaattcttttggggaagtgaggaagccaggtccacggtctgttcttgaagcagtagcctaacacactccaagatatggacacacgggagccgctggcagaagggacttcacgaagtgttgcatggatgttttagccattgttggctttcccttatcaaacttgggcccttcccttcttggtttccaaaggcatttattgctgagttatatgttcactgtccccctaatattagggagtaaaacggataccaagttgatttagtgtttttacctctgtcttggctttcatgttattaaacgtatgcatgtgaagaagggtgtttttctgttttatattcaactcataagactttgggataggaaaaatgagtaatggttactaggcttaatacctgggtgattacataatctgtacaacgaacccccatgatgtaagtttacctatgtaacaaacctgcacttatacccatgaacttaaaatgaaagttaaaaataaaaaacatatacaaataaaaaaaa

SEQ ID NO: 135 - protein, 205 aa, Homo sapiens
MSRGLQLLLLSCAYSLAPATPEVKVACSEDVDLPCTAPWDPQVPYTVSWVKLLEGGEERMETPQEDHLRGQHYHQKGQNGSFDAPNERPYSLKIRNTTSCNSGTYRCTLQDPDGQRNLSGKVILRVTGCPAQRKEETFKKYRAEIVLLLALVIFYLTLIIFTCKFARLQSIFPDFSKAGMERAFLPVTSPNKHLGLVTPHKTELV

SEQ ID NO: 136 - DNA, 1047 bp, Homo sapiens
cgaattcccctatcacctaagtgtgggctaatgtaacaaagagggatttcacctacatccattcagtcagtctttgggggtttaaagaaattccaaagagtcatcagaagaggaaaaatgaaggtaatgttttttcagacaggtaaagtctttgaaaatatgtgtaatatgtaaaacattttgacacccccataatatttttccagaattaacagtataaattgcatctcttgttcaagagttccctatcactctctttaatcactactcacagtaacctcaactcctgccacaatgtacaggatgcaactcctgtcttgcattgcactaagtcttgcacttgtcacaaacagtgcacctacttcaagttctacaaagaaaacacagctacaactggagcatttactgctggatttacagatgattttgaatggaattaataattacaagaatcccaaactcaccaggatgctcacatttaagttttacatgcccaagaaggccacagaactgaaacatcttcagtgtctagaagaagaactcaaacctctggaggaagtgctaaatttagctcaaagcaaaaactttcacttaagacccagggacttaatcagcaatatcaacgtaatagttctggaactaaagggatctgaaacaacattcatgtgtgaatatgctgatgagacagcaaccattgtagaatttctgaacagatggattaccttttgtcaaagcatcatctcaacactgacttgataattaagtgcttcccacttaaaacatatcaggccttctatttatttaaatatttaaattttatatttattgttgaatgtatggtttgctacctattgtaactattattcttaatcttaaaactataaatatggatcttttatgattctttttgtaagccctaggggctctaaaatggtttcacttatttatcccaaaatatttattattatgttgaatgttaaatatagtatctatgtagattggttagtaaaactatttaataaatttgataaatataaaaaaaaaaaa

SEQ ID NO: 137 - protein, 153 aa, Homo sapiens
MYRMQLLSCIALSLALVTNSAPTSSSTKKTQLQLEHLLLDLQMILNGINNYKNPKLTRMLTFKFYMPKKATELKHLQCLEEELKPLEEVLNLAQSKNFHLRPRDLISNINVIVLELKGSETTFMCEYADETATIVEFLNRWITFCQSIISTLT

SEQ ID NO: 138 - DNA, 1702 bp, Homo sapiens
agactcaacaagagctccagcaaagactttcactgtagcttgacttgacctgagattaactagggaatcttgagaataaagatgagctctgaaaattgtttcgtagcagagaacagctctttgcatccggagagtggacaagaaaatgatgccaccagtccccatttctcaacacgtcatgaagggtccttccaagttcctgtcctgtgtgctgtaatgaatgtggtcttcatcaccattttaatcatagctctcattgccttatcagtgggccaatacaattgtccaggccaatacacattctcaatgccatcagacagccatgtttcttcatgctctgaggactgggttggctaccagaggaaatgctactttatttctactgtgaagaggagctggacttcagcccaaaatgcttgttctgaacatggtgctactcttgctgtcattgattctgaaaaggacatgaactttctaaaacgatacgcaggtagagaggaacactgggttggactgaaaaaggaacctggtcacccatggaagtggtcaaatggcaaagaatttaacaactggttcaacgttacagggtctgacaagtgtgtttttctgaaaaacacagaggtcagcagcatggaatgtgagaagaatttatactggatatgtaacaaaccttacaaataataaggaaacatgttcacttattgactattatagaatggaactcaaggaaatctgtgtcagtggatgctgctctgtggtccgaagtcttccatagagactttgtgaaaaaaaattttatagtgtcttgggaattttcttccaaacagaactatggaaaaaaaggaagaaattccaggaaaatctgcactgtgggcttttattgccatgagctagaagcatcacaggttgaccaataaccatgcccaagaatgagaagaatgactatgcaacctttggatgcactttatattattttgaatccagaaataatgaaataactaggcgtggacttactatttattgctgaatgactaccaacagtgagagcccttcatgcatttgcactactggaaggagttagatgttggtactagatactgaatgtaaacaaaggaattatggctggtaacataggtttttagtctaattgaatcccttaaactcagggagcatttataaatggacaaatgcttatgaaactaagatttgtaatatttctctctttttagagaaatttgccaatttactttgttatttttccccaaaaagaatgggatgatcgtgtatttatttttttacttcctcagctgtagacaggtccttttcgatggtacatatttctttgcctttataatcttttatacagtgtcttacagagaaaagacataagcaaagactatgaggaatatttgcaagacatagaatagtgttggaaaatgtgcaatatgtgatgtggcaaatctctattaggaaatattctgtaatcttcagacctagaataatactagtcttataataggtttgtgactttcctaaatcaattctattacgtgcaatacttcaatacttcatttaaaatatttttatgtgcaataaaatgtatttgtttgtattttgtgttcagtacaattataagctgtttttatatatgtgaaataaaagtagaataaacacaaaaaaaaaaaaaaaaaaaaaaaaaaaa

SEQ ID NO: 139 - protein, 199 aa, Homo sapiens
MSSENCFVAENSSLHPESGQENDATSPHFSTRHEGSFQVPVLCAVMNVVFITILIIALIALSVGQYNCPGQYTFSMPSDSHVSSCSEDWVGYQRKCYFISTVKRSWTSAQNACSEHGATLAVIDSEKDMNFLKRYAGREEHWVGLKKEPGHPWKWSNGKEFNNWFNVTGSDKCVFLKNTEVSSMECEKNLYWICNKPYK

SEQ ID NO: 140 - DNA, 2116 bp, Homo sapiens
acatccgcggcaacgcctccttggtgtcgtccgcttccaataacccagcttgcgtcctgcacacttgtggcttccgtgcacacattaacaactcatggttctagctcccagtcgccaagcgttgccaaggcgttgagagatcatctgggaagtcttttacccagaattgctttgattcaggccagctggtttttcctgcggtgattcggaaattcgcgaattcctctggtcctcatccaggtgcgcgggaagcaggtgcccaggagagaggggataatgaagattccatgctgatgatcccaaagattgaacctgcagaccaagcgcaaagtagaaactgaaagtacactgctggcggatcctacggaagttatggaaaaggcaaagcgcagagccacgccgtagtgtgtgccgccccccttgggatggatgaaactgcagtcgcggcgtgggtaagaggaaccagctgcagagatcaccctgcccaacacagactcggcaactccgcggaagaccagggtcctgggagtgactatgggcggtgagagcttgctcctgctccagttgcggtcatcatgactacgcccgcctcccgcagaccatgttccatgtttcttttaggtatatctttggacttcctcccctgatccttgttctgttgccagtagcatcatctgattgtgatattgaaggtaaagatggcaaacaatatgagagtgttctaatggtcagcatcgatcaattattggacagcatgaaagaaattggtagcaattgcctgaataatgaatttaacttttttaaaagacatatctgtgatgctaataaggaaggtatgtttttattccgtgctgctcgcaagttgaggcaatttcttaaaatgaatagcactggtgattttgatctccacttattaaaagtttcagaaggcacaacaatactgttgaactgcactggccaggttaaaggaagaaaaccagctgccctgggtgaagcccaaccaacaaagagtttggaagaaaataaatctttaaaggaacagaaaaaactgaatgacttgtgtttcctaaagagactattacaagagataaaaacttgttggaataaaattttgatgggcactaaagaacactgaaaaatatggagtggcaatatagaaacacgaactttagctgcatcctccaagaatctatctgcttatgcagtttttcagagtggaatgcttcctagaagttactgaatgcaccatggtcaaaacggattagggcatttgagaaatgcatattgtattactagaagatgaatacaaacaatggaaactgaatgctccagtcaacaaactatttcttatatatgtgaacatttatcaatcagtataattctgtactgatttttgtaagacaatccatgtaaggtatcagttgcaataatacttctcaaacctgtttaaatatttcaagacattaaatctatgaagtatataatggtttcaaagattcaaaattgacattgctttactgtcaaaataattttatggctcactatgaatctattatactgtattaagagtgaaaattgtcttcttctgtgctggagatgttttagagttaacaatgatatatggataatgccggtgagaataagagagtcataaaccttaagtaagcaacagcataacaaggtccaagatacctaaaagagatttcaagagatttaattaatcatgaatgtgtaacacagtgccttcaataaatggtatagcaaatgttttgacatgaaaaaaggacaatttcaaaaaaataaaataaaataaaaataaattcacctagtctaaggatgctaaaccttagtactgagttacattgtcatttatatagattataacttgtctaaataagtttgcaatttgggagatatatttttaagataataatatatgtttaccttttaattaatgaaatatctgtatttaattttgacactatatctgtatataaaatattttcatacagcattacaaattgcttactttggaatacatttctcctttgataaaataaatgagctatgtattaacaaaaaaaaaaaaaaaaaaaaaaaaaaaaaaaaaaaaaaa

SEQ ID NO: 141 - protein, 177 aa, Homo sapiens
MFHVSFRYIFGLPPLILVLLPVASSDCDIEGKDGKQYESVLMVSIDQLLDSMKEIGSNCLNNEFNFFKRHICDANKEGMFLFRAARKLRQFLKMNSTGDFDLHLLKVSEGTTILLNCTGQVKGRKPAALGEAQPTKSLEENKSLKEQKKLNDLCFLKRLLQEIKTCWNKILMGTKEH

SEQ ID NO: 142 - DNA, 1496 bp, Homo sapiens
gactccgggtggcaggcgcccgggggaatcccagctgactcgctcactgccttcgaagtccggcgccccccgggagggaactgggtggccgcaccctcccggctgcggtggctgtcgccccccaccctgcagccaggactcgatggagaatccattccaatatatggccatgtggctctttggagcaatgttccatcatgttccatgctgctgctgacgtcacatggagcacagaaatcaatgttagcagatagccagcccatacaagatcgtattgtattgtaggaggcatcgtggatggatggctgctggaaaccccttgccatagccagctcttcttcaatacttaaggatttaccgtggctttgagtaatgagaatttcgaaaccacatttgagaagtatttccatccagtgctacttgtgtttacttctaaacagtcattttctaactgaagctggcattcatgtcttcattttgggctgtttcagtgcagggcttcctaaaacagaagccaactgggtgaatgtaataagtgatttgaaaaaaattgaagatcttattcaatctatgcatattgatgctactttatatacggaaagtgatgttcaccccagttgcaaagtaacagcaatgaagtgctttctcttggagttacaagttatttcacttgagtccggagatgcaagtattcatgatacagtagaaaatctgatcatcctagcaaacaacagtttgtcttctaatgggaatgtaacagaatctggatgcaaagaatgtgaggaactggaggaaaaaaatattaaagaatttttgcagagttttgtacatattgtccaaatgttcatcaacacttcttgattgcaattgattctttttaaagtgtttctgttattaacaaacatcactctgctgcttagacataacaaaacactcggcatttcaaatgtgctgtcaaaacaagtttttctgtcaagaagatgatcagaccttggatcagatgaactcttagaaatgaaggcagaaaaatgtcattgagtaatatagtgactatgaacttctctcagacttactttactcatttttttaatttattattgaaattgtacatatttgtggaataatgtaaaatgttgaataaaaatatgtacaagtgttgttttttaagttgcactgatattttacctcttattgcaaaatagcatttgtttaagggtgatagtcaaattatgtattggtggggctgggtaccaatgctgcaggtcaacagctatgctggtaggctcctgccagtgtggaaccactgactactggctctcattgacttccttactaagcatagcaaacagaggaagaatttgttatcagtaagaaaaagaagaactatatgtgaatcctcttctttatactgtaatttagttattgatgtataaagcaactgttatgaaataaagaaattgcaataactggcaaaaaaaaaaaaaaaaaaaaaaaaa

SEQ ID NO: 143 - protein, 162 aa, Homo sapiens
MRISKPHLRSISIQCYLCLLLNSHFLTEAGIHVFILGCFSAGLPKTEANWVNVISDLKKIEDLIQSMHIDATLYTESDVHPSCKVTAMKCFLLELQVISLESGDASIHDTVENLIILANNSLSSNGNVTESGCKECEELEEKNIKEFLQSFVHIVQMFINTS

SEQ ID NO: 144 - DNA, 1498 bp, Homo sapiens
accaaacctcttcgaggcacaaggcacaacaggctgctctgggattctcttcagccaatcttcattgctcaagtgtctgaagcagccatggcagaagtacctgagctcgccagtgaaatgatggcttattacagtggcaatgaggatgacttgttctttgaagctgatggccctaaacagatgaagtgctccttccaggacctggacctctgccctctggatggcggcatccagctacgaatctccgaccaccactacagcaagggcttcaggcaggccgcgtcagttgttgtggccatggacaagctgaggaagatgctggttccctgcccacagaccttccaggagaatgacctgagcaccttctttcccttcatctttgaagaagaacctatcttcttcgacacatgggataacgaggcttatgtgcacgatgcacctgtacgatcactgaactgcacgctccgggactcacagcaaaaaagcttggtgatgtctggtccatatgaactgaaagctctccacctccagggacaggatatggagcaacaagtggtgttctccatgtcctttgtacaaggagaagaaagtaatgacaaaatacctgtggccttgggcctcaaggaaaagaatctgtacctgtcctgcgtgttgaaagatgataagcccactctacagctggagagtgtagatcccaaaaattacccaaagaagaagatggaaaagcgatttgtcttcaacaagatagaaatcaataacaagctggaatttgagtctgcccagttccccaactggtacatcagcacctctcaagcagaaaacatgcccgtcttcctgggagggaccaaaggcggccaggatataactgacttcaccatgcaatttgtgtcttcctaaagagagctgtacccagagagtcctgtgctgaatgtggactcaatccctagggctggcagaaagggaacagaaaggtttttgagtacggctatagcctggactttcctgttgtctacaccaatgcccaactgcctgccttagggtagtgctaagaggatctcctgtccatcagccaggacagtcagctctctcctttcagggccaatccccagcccttttgttgagccaggcctctctcacctctcctactcacttaaagcccgcctgacagaaaccacggccacatttggttctaagaaaccctctgtcattcgctcccacattctgatgagcaaccgcttccctatttatttatttatttgtttgtttgttttattcattggtctaatttattcaaagggggcaagaagtagcagtgtctgtaaaagagcctagtttttaatagctatggaatcaattcaatttggactggtgtgctctctttaaatcaagtcctttaattaagactgaaaatatataagctcagattatttaaatgggaatatttataaatgagcaaatatcatactgttcaatggttctgaaataaacttcactgaag

SEQ ID NO: 145 - protein, 269 aa, Homo sapiens
MAEVPELASEMMAYYSGNEDDLFFEADGPKQMKCSFQDLDLCPLDGGIQLRISDHHYSKGFRQAASVVVAMDKLRKMLVPCPQTFQENDLSTFFPFIFEEEPIFFDTWDNEAYVHDAPVRSLNCTLRDSQQKSLVMSGPYELKALHLQGQDMEQQVVFSMSFVQGEESNDKIPVALGLKEKNLYLSCVLKDDKPTLQLESVDPKNYPKKKMEKRFVFNKIEINNKLEFESAQFPNWYISTSQAENMPVFLGGTKGGQDITDFTMQFVSS

SEQ ID NO: 146 - DNA, 1669 bp, Homo sapiens
ctccctcagcaaggacagcagaggaccagctaagagggagagaagcaactacagaccccccctgaaaacaaccctcagacgccacatcccctgacaagctgccaggcaggttctcttcctctcacatactgacccacggctccaccctctctcccctggaaaggacaccatgagcactgaaagcatgatccgggacgtggagctggccgaggaggcgctccccaagaagacaggggggccccagggctccaggcggtgcttgttcctcagcctcttctccttcctgatcgtggcaggcgccaccacgctcttctgcctgctgcactttggagtgatcggcccccagagggaagagttccccagggacctctctctaatcagccctctggcccaggcagtcagatcatcttctcgaaccccgagtgacaagcctgtagcccatgttgtagcaaaccctcaagctgaggggcagctccagtggctgaaccgccgggccaatgccctcctggccaatggcgtggagctgagagataaccagctggtggtgccatcagagggcctgtacctcatctactcccaggtcctcttcaagggccaaggctgcccctccacccatgtgctcctcacccacaccatcagccgcatcgccgtctcctaccagaccaaggtcaacctcctctctgccatcaagagcccctgccagagggagaccccagagggggctgaggccaagccctggtatgagcccatctatctgggaggggtcttccagctggagaagggtgaccgactcagcgctgagatcaatcggcccgactatctcgactttgccgagtctgggcaggtctactttgggatcattgccctgtgaggaggacgaacatccaaccttcccaaacgcctcccctgccccaatccctttattaccccctccttcagacaccctcaacctcttctggctcaaaaagagaattgggggcttagggtcggaacccaagcttagaactttaagcaacaagaccaccacttcgaaacctgggattcaggaatgtgtggcctgcacagtgaagtgctggcaaccactaagaattcaaactggggcctccagaactcactggggcctacagctttgatccctgacatctggaatctggagaccagggagcctttggttctggccagaatgctgcaggacttgagaagacctcacctagaaattgacacaagtggaccttaggccttcctctctccagatgtttccagacttccttgagacacggagcccagccctccccatggagccagctccctctatttatgtttgcacttgtgattatttattatttatttattatttatttatttacagatgaatgtatttatttgggagaccggggtatcctgggggacccaatgtaggagctgccttggctcagacatgttttccgtgaaaacggagctgaacaataggctgttcccatgtagccccctggcctctgtgccttcttttgattatgttttttaaaatatttatctgattaagttgtctaaacaatgctgatttggtgaccaactgtcactcattgctgagcctctgctccccaggggagttgtgtctgtaatcgccctactattcagtggcgagaaataaagtttgcttagaaaagaa

SEQ ID NO: 147 - protein, 233 aa, Homo sapiens
MSTESMIRDVELAEEALPKKTGGPQGSRRCLFLSLFSFLIVAGATTLFCLLHFGVIGPQREEFPRDLSLISPLAQAVRSSSRTPSDKPVAHVVANPQAEGQLQWLNRRANALLANGVELRDNQLVVPSEGLYLIYSQVLFKGQGCPSTHVLLTHTISRIAVSYQTKVNLLSAIKSPCQRETPEGAEAKPWYEPIYLGGVFQLEKGDRLSAEINRPDYLDFAESGQVYFGIIAL

SEQ ID NO: 148 - DNA, 1125 bp, Homo sapiens
ttctgccctcgagcccaccgggaacgaaagagaagctctatctcgcctccaggagcccagctatgaactccttctccacaagcgccttcggtccagttgccttctccctggggctgctcctggtgttgcctgctgccttccctgccccagtacccccaggagaagattccaaagatgtagccgccccacacagacagccactcacctcttcagaacgaattgacaaacaaattcggtacatcctcgacggcatctcagccctgagaaaggagacatgtaacaagagtaacatgtgtgaaagcagcaaagaggcactggcagaaaacaacctgaaccttccaaagatggctgaaaaagatggatgcttccaatctggattcaatgaggagacttgcctggtgaaaatcatcactggtcttttggagtttgaggtatacctagagtacctccagaacagatttgagagtagtgaggaacaagccagagctgtgcagatgagtacaaaagtcctgatccagttcctgcagaaaaaggcaaagaatctagatgcaataaccacccctgacccaaccacaaatgccagcctgctgacgaagctgcaggcacagaaccagtggctgcaggacatgacaactcatctcattctgcgcagctttaaggagttcctgcagtccagcctgagggctcttcggcaaatgtagcatgggcacctcagattgttgttgttaatgggcattccttcttctggtcagaaacctgtccactgggcacagaacttatgttgttctctatggagaactaaaagtatgagcgttaggacactattttaattatttttaatttattaatatttaaatatgtgaagctgagttaatttatgtaagtcatatttatatttttaagaagtaccacttgaaacattttatgtattagttttgaaataataatggaaagtggctatgcagtttgaatatcctttgtttcagagccagatcatttcttggaaagtgtaggcttacctcaaataaatggctaacttatacatatttttaaagaaatatttatattgtatttatataatgtataaatggtttttataccaataaatggcattttaaaaaattc

SEQ ID NO: 149 - protein, 212 aa, Homo sapiens
MNSFSTSAFGPVAFSLGLLLVLPAAFPAPVPPGEDSKDVAAPHRQPLTSSERIDKQIRYILDGISALRKETCNKSNMCESSKEALAENNLNLPKMAEKDGCFQSGFNEETCLVKIITGLLEFEVYLEYLQNRFESSEEQARAVQMSTKVLIQFLQKKAKNLDAITTPDPTTNASLLTKLQAQNQWLQDMTTHLILRSFKEFLQSSLRALRQM

SEQ ID NO: 150 - DNA, 1666 bp, Homo sapiens
ctccataaggcacaaactttcagagacagcagagcacacaagcttctaggacaagagccaggaagaaaccaccggaaggaaccatctcactgtgtgtaaacatgacttccaagctggccgtggctctcttggcagccttcctgatttctgcagctctgtgtgaaggtgcagttttgccaaggagtgctaaagaacttagatgtcagtgcataaagacatactccaaacctttccaccccaaatttatcaaagaactgagagtgattgagagtggaccacactgcgccaacacagaaattattgtaaagctttctgatggaagagagctctgtctggaccccaaggaaaactgggtgcagagggttgtggagaagtttttgaagagggctgagaattcataaaaaaattcattctctgtggtatccaagaatcagtgaagatgccagtgaaacttcaagcaaatctacttcaacacttcatgtattgtgtgggtctgttgtagggttgccagatgcaatacaagattcctggttaaatttgaatttcagtaaacaatgaatagtttttcattgtaccatgaaatatccagaacatacttatatgtaaagtattatttatttgaatctacaaaaaacaacaaataatttttaaatataaggattttcctagatattgcacgggagaatatacaaatagcaaaattgaggccaagggccaagagaatatccgaactttaatttcaggaattgaatgggtttgctagaatgtgatatttgaagcatcacataaaaatgatgggacaataaattttgccataaagtcaaatttagctggaaatcctggatttttttctgttaaatctggcaaccctagtctgctagccaggatccacaagtccttgttccactgtgccttggtttctcctttatttctaagtggaaaaagtattagccaccatcttacctcacagtgatgttgtgaggacatgtggaagcactttaagttttttcatcataacataaattattttcaagtgtaacttattaacctatttattatttatgtatttatttaagcatcaaatatttgtgcaagaatttggaaaaatagaagatgaatcattgattgaatagttataaagatgttatagtaaatttattttattttagatattaaatgatgttttattagataaatttcaatcagggtttttagattaaacaaacaaacaattgggtacccagttaaattttcatttcagataaacaacaaataattttttagtataagtacattattgtttatctgaaattttaattgaactaacaatcctagtttgatactcccagtcttgtcattgccagctgtgttggtagtgctgtgttgaattacggaataatgagttagaactattaaaacagccaaaactccacagtcaatattagtaatttcttgctggttgaaacttgtttattatgtacaaatagattcttataatattatttaaatgactgcatttttaaatacaaggctttatatttttaactttaagatgtttttatgtgctctccaaattttttttactgtttctgattgtatggaaatataaaagtaaatatgaaacatttaaaatataatttgttgtcaaagtaaaaaaaaaaaaaaa

SEQ ID NO: 151 - protein, 99 aa, Homo sapiens
MTSKLAVALLAAFLISAALCEGAVLPRSAKELRCQCIKTYSKPFHPKFIKELRVIESGPHCANTEIIVKLSDGRELCLDPKENWVQRVVEKFLKRAENS

SEQ ID NO: 152 - DNA, 2512 bp, Homo sapiens
ggctggtgcaaggagccacagtgggctgcctggggggctgatgccaccattccaggagcctcggtgaagagaggatatccatctgtgtagccgcttctctatacgggattccagctccatggcagcccgtctgctcctcctgggcatccttctcctgctgctgcccctgcccgtccctgccccgtgccacacagccgcacgctcagagtgcaagcgcagccacaagttcgtgcctggtgcatggctggccggggagggtgtggacgtgaccagcctccgccgctcgggctccttcccagtggacacacaaaggttcctgcggcccgacggcacctgcaccctctgtgaaaatgccctacaggagggcaccctccagcgcctgcctctggcgctcaccaactggcgggcccagggctctggctgccagcgccatgtaaccagggccaaagtcagctccactgaagctgtggcccgggatgcggctcgtagcatccgcaacgactggaaggtcgggctggacgtgactcctaagcccaccagcaatgtgcatgtgtctgtggccggctcacactcacaggcagccaactttgcagcccagaagacccaccaggaccagtacagcttcagcactgacacggtggagtgccgcttctacagtttccatgtggtacacactcccccgctgcaccctgacttcaagagggccctcggggacctgccccaccacttcaacgcctccacccagcccgcctacctcaggcttatctccaactacggcacccacttcatccgggctgtggagctgggtggccgcatatcggccctcactgccctgcgcacctgcgagctggccctggaagggctcacggacaacgaggtggaggactgcctgactgtcgaggcccaggtcaacataggcatccacggcagcatctctgccgaagccaaggcctgtgaggagaagaagaagaagcacaagatgacggcctccttccaccaaacctaccgggagcgccactcggaagtggttggcggccatcacacctccattaacgacctgctgttcgggatccaggccgggcccgagcagtactcagcctgggtaaactcgctgcccggcagccctggcctggtggactacaccctggaacccctgcacgtgctgctggacagccaggacccgcggcgggaggcactgaggagggccctgagtcagtacctgacggacagggctcgctggagggactgcagccggccgtgcccaccagggcggcagaagagcccccgagacccatgccagtgtgtgtgccatggctcagcggtcaccacccaggactgctgccctcggcagaggggcctggcccagctggaggtgaccttcatccaagcatggggcctgtggggggactggttcactgccacggatgcctatgtgaagctcttctttggtggccaggagctgaggacgagcaccgtgtgggacaataacaaccccatctggtcagtgcggctggattttggggatgtgctcctggccacaggggggcccctgaggttgcaggtctgggatcaggactctggcagggacgatgacctccttggcacctgtgatcaggctcccaagtctggttcccatgaggtgagatgcaacctgaatcatggccacctaaaattccgctatcatgccaggtgcttgccccacctgggaggaggcacctgcctggactatgtcccccaaatgcttctgggggagcctccaggaaaccggagtggggccgtgtggtgagaacagtgagcttggaaaggaccagtatgcttggactgaaggggttctcacagtgggagccagggctgtcttcgtattcccattagaccaagcttgtccaacccgaggcccgcatgcggcccaggatggctttgaatgcggcccaacgcaaattcgcaaactttcttaaaacattatgagtttctttttgctattttttttttttttttagctcatcggctatcgttagtgctagtggattttacatgtggcccaacacaattcttcttccaacgtggcccagagaagccaaaagattggatacgcatcagacagatggaaaagggagattcagactgtttttcagggaggtggctgggtttacacgctaatcccgattcaccctgtccaaactgcctaagccctccgccattctcaagccctgcagtcacagctacacagatcacagcttcagccaggagctgggcagaaggccaagaggctgttcccaccaggctgctcagggctggtcttttaggacccttcccttgagccctctatggtgtggcaaagccttcattgccttaactggagccccatcagctccagctgctctgtcttctttgcccacaatgctttgcccctgagacaaatggaggcctgtcctgacctgtctcaccatgtacatagcttgataaagggccaataaatatgatgttatggtgaaaaaaaaaaaaaaaaaaaaaa

SEQ ID NO: 153 - protein, 555 aa, Homo sapiens
MAARLLLLGILLLLLPLPVPAPCHTAARSECKRSHKFVPGAWLAGEGVDVTSLRRSGSFPVDTQRFLRPDGTCTLCENALQEGTLQRLPLALTNWRAQGSGCQRHVTRAKVSSTEAVARDAARSIRNDWKVGLDVTPKPTSNVHVSVAGSHSQAANFAAQKTHQDQYSFSTDTVECRFYSFHVVHTPPLHPDFKRALGDLPHHFNASTQPAYLRLISNYGTHFIRAVELGGRISALTALRTCELALEGLTDNEVEDCLTVEAQVNIGIHGSISAEAKACEEKKKKHKMTASFHQTYRERHSEVVGGHHTSINDLLFGIQAGPEQYSAWVNSLPGSPGLVDYTLEPLHVLLDSQDPRREALRRALSQYLTDRARWRDCSRPCPPGRQKSPRDPCQCVCHGSAVTTQDCCPRQRGLAQLEVTFIQAWGLWGDWFTATDAYVKLFFGGQELRTSTVWDNNNPIWSVRLDFGDVLLATGGPLRLQVWDQDSGRDDDLLGTCDQAPKSGSHEVRCNLNHGHLKFRYHARCLPHLGGGTCLDYVPQMLLGEPPGNRSGAVW

SEQ ID NO: 154 - DNA, 955 bp, Homo sapiens
ccaagagctaaaagagagtaagggggaaacaacagcagctccaaccagggcagccttcctgagaagatgcaaccaatcctgcttctgctggccttcctcctgctgcccagggcagatgcaggggagatcatcgggggacatgaggccaagccccactcccgcccctacatggcttatcttatgatctgggatcagaagtctctgaagaggtgcggtggcttcctgatacaagacgacttcgtgctgacagctgctcactgttggggaagctccataaatgtcaccttgggggcccacaatatcaaagaacaggagccgacccagcagtttatccctgtgaaaagacccatcccccatccagcctataatcctaagaacttctccaacgacatcatgctactgcagctggagagaaaggccaagcggaccagagctgtgcagcccctcaggctacctagcaacaaggcccaggtgaagccagggcagacatgcagtgtggccggctgggggcagacggcccccctgggaaaacactcacacacactacaagaggtgaagatgacagtgcaggaagatcgaaagtgcgaatctgacttacgccattattacgacagtaccattgagttgtgcgtgggggacccagagattaaaaagacttcctttaagggggactctggaggccctcttgtgtgtaacaaggtggcccagggcattgtctcctatggacgaaacaatggcatgcctccacgagcctgcaccaaagtctcaagctttgtacactggataaagaaaaccatgaaacgctactaactacaggaagcaaactaagcccccgctgtaatgaaacaccttctctggagccaagtccagatttacactgggagaggtgccagcaactgaataaatacctcttagctgagtggaaaaaaaaaaaaaaaaaaaaaaaaaaaaaaaa

SEQ ID NO: 155 - protein, 247 aa, Homo sapiens
MQPILLLLAFLLLPRADAGEIIGGHEAKPHSRPYMAYLMIWDQKSLKRCGGFLIQDDFVLTAAHCWGSSINVTLGAHNIKEQEPTQQFIPVKRPIPHPAYNPKNFSNDIMLLQLERKAKRTRAVQPLRLPSNKAQVKPGQTCSVAGWGQTAPLGKHSHTLQEVKMTVQEDRKCESDLRHYYDSTIELCVGDPEIKKTSFKGDSGGPLVCNKVAQGIVSYGRNNGMPPRACTKVSSFVHWIKKTMKRY

SEQ ID NO: 156 - DNA, 738 bp, Homo sapiens
gtatctgtggtaaacccagtgacacgggggagatgacatacaaaaagggcaggacctgagaaagattaagctgcaggctccctgcccataaaacagggtgtgaaaggcatctcagcggctgccccaccatggctacctgggccctcctgctccttgcagccatgctcctgggcaacccaggtctggtcttctctcgtctgagccctgagtactacgacctggcaagagcccacctgcgtgatgaggagaaatcctgcccgtgcctggcccaggagggcccccagggtgacctgttgaccaaaacacaggagctgggccgtgactacaggacctgtctgacgatagtccaaaaactgaagaagatggtggataagcccacccagagaagtgtttccaatgctgcgacccgggtgtgtaggacggggaggtcacgatggcgcgacgtctgcagaaatttcatgaggaggtatcagtctagagttacccagggcctcgtggccggagaaactgcccagcagatctgtgaggacctcaggttgtgtataccttctacaggtcccctctgagccctctcaccttgtcctgtggaagaagcacaggctcctgtcctcagatcccgggaacctcagcaacctctgccggctcctcgcttcctcgatccagaatccactctccagtctccctcccctgactccctctgctgtcctcccctctcacgagaataaagtgtcaagcaag

SEQ ID NO: 157 - protein, 145 aa, Homo sapiens
MATWALLLLAAMLLGNPGLVFSRLSPEYYDLARAHLRDEEKSCPCLAQEGPQGDLLTKTQELGRDYRTCLTIVQKLKKMVDKPTQRSVSNAATRVCRTGRSRWRDVCRNFMRRYQSRVTQGLVAGETAQQICEDLRLCIPSTGPL

SEQ ID NO: 158 - DNA, 1193 bp, Homo sapiens
tgaagatcagctattagaagagaaagatcagttaagtcctttggacctgatcagcttgatacaagaactactgatttcaacttctttggcttaattctctcggaaacgatgaaatatacaagttatatcttggcttttcagctctgcatcgttttgggttctcttggctgttactgccaggacccatatgtaaaagaagcagaaaaccttaagaaatattttaatgcaggtcattcagatgtagcggataatggaactcttttcttaggcattttgaagaattggaaagaggagagtgacagaaaaataatgcagagccaaattgtctccttttacttcaaactttttaaaaactttaaagatgaccagagcatccaaaagagtgtggagaccatcaaggaagacatgaatgtcaagtttttcaatagcaacaaaaagaaacgagatgacttcgaaaagctgactaattattcggtaactgacttgaatgtccaacgcaaagcaatacatgaactcatccaagtgatggctgaactgtcgccagcagctaaaacagggaagcgaaaaaggagtcagatgctgtttcaaggtcgaagagcatcccagtaatggttgtcctgcctgcaatatttgaattttaaatctaaatctatttattaatatttaacattatttatatggggaatatatttttagactcatcaatcaaataagtatttataatagcaacttttgtgtaatgaaaatgaatatctattaatatatgtattatttataattcctatatcctgtgactgtctcacttaatcctttgttttctgactaattaggcaaggctatgtgattacaaggctttatctcaggggccaactaggcagccaacctaagcaagatcccatgggttgtgtgtttatttcacttgatgatacaatgaacacttataagtgaagtgatactatccagttactgccggtttgaaaatatgcctgcaatctgagccagtgctttaatggcatgtcagacagaacttgaatgtgtcaggtgaccctgatgaaaacatagcatctcaggagatttcatgcctggtgcttccaaatattgttgacaactgtgactgtacccaaatggaaagtaactcatttgttaaaattatcaatatctaatatatatgaataaagtgtaagttcacaact

SEQ ID NO: 159 - protein, 166 aa, Homo sapiens
MKYTSYILAFQLCIVLGSLGCYCQDPYVKEAENLKKYFNAGHSDVADNGTLFLGILKNWKEESDRKIMQSQIVSFYFKLFKNFKDDQSIQKSVETIKEDMNVKFFNSNKKKRDDFEKLTNYSVTDLNVQRKAIHELIQVMAELSPAAKTGKRKRSQMLFQGRRASQ

SEQ ID NO: 160 - DNA, 1386 bp, Homo sapiens
gccccatctccttgggctgcccgtgcttcgtgctttggactaccgcccagcagtgtcctgccctctgcctgggcctcggtccctcctgcacctgctgcctggatccccggcctgcctgggcctgggccttggttctccccatgacaccacctgaacgtctcttcctcccaagggtgtgtggcaccaccctacacctcctccttctggggctgctgctggttctgctgcctggggcccaggggctccctggtgttggcctcacaccttcagctgcccagactgcccgtcagcaccccaagatgcatcttgcccacagcaccctcaaacctgctgctcacctcattggagaccccagcaagcagaactcactgctctggagagcaaacacggaccgtgccttcctccaggatggtttctccttgagcaacaattctctcctggtccccaccagtggcatctacttcgtctactcccaggtggtcttctctgggaaagcctactctcccaaggccacctcctccccactctacctggcccatgaggtccagctcttctcctcccagtaccccttccatgtgcctctcctcagctcccagaagatggtgtatccagggctgcaggaaccctggctgcactcgatgtaccacggggctgcgttccagctcacccagggagaccagctatccacccacacagatggcatcccccacctagtcctcagccctagtactgtcttctttggagccttcgctctgtagaacttggaaaaatccagaaagaaaaaataattgatttcaagaccttctccccattctgcctccattctgaccatttcaggggtcgtcaccacctctcctttggccattccaacagctcaagtcttccctgatcaagtcaccggagctttcaaagaaggaattctaggcatcccaggggaccacacctccctgaaccatccctgatgtctgtctggctgaggatttcaagcctgcctaggaattcccagcccaaagctgttggtctgtcccaccagctaggtggggcctagatccacacacagaggaagagcaggcacatggaggagcttgggggatgactagaggcagggaggggactatttatgaaggcaaaaaaattaaattatttatttatggaggatggagagaggggaataatagaagaacatccaaggagaaacagagacaggcccaagagatgaagagtgagagggcatgcgcacaaggctgaccaagagagaaagaagtaggcatgagggatcacagggccccagaaggcagggaaaggctctgaaagccagctgccgaccagagccccacacggaggcatctgcaccctcgatgaagcccaataaacctcttttctctg

SEQ ID NO: 161 - protein, 205 aa, Homo sapiens
MTPPERLFLPRVCGTTLHLLLLGLLLVLLPGAQGLPGVGLTPSAAQTARQHPKMHLAHSTLKPAAHLIGDPSKQNSLLWRANTDRAFLQDGFSLSNNSLLVPTSGIYFVYSQVVFSGKAYSPKATSSPLYLAHEVQLFSSQYPFHVPLLSSQKMVYPGLQEPWLHSMYHGAAFQLTQGDQLSTHTDGIPHLVLSPSTVFFGAFAL

SEQ ID NO: 162 - DNA, 781 bp, Homo sapiens
acacagagagaaaggctaaagttctctggaggatgtggctgcagagcctgctgctcttgggcactgtggcctgcagcatctctgcacccgcccgctcgcccagccccagcacgcagccctgggagcatgtgaatgccatccaggaggcccggcgtctcctgaacctgagtagagacactgctgctgagatgaatgaaacagtagaagtcatctcagaaatgtttgacctccaggagccgacctgcctacagacccgcctggagctgtacaagcagggcctgcggggcagcctcaccaagctcaagggccccttgaccatgatggccagccactacaagcagcactgccctccaaccccggaaacttcctgtgcaacccagattatcacctttgaaagtttcaaagagaacctgaaggactttctgcttgtcatcccctttgactgctgggagccagtccaggagtgagaccggccagatgaggctggccaagccggggagctgctctctcatgaaacaagagctagaaactcaggatggtcatcttggagggaccaaggggtgggccacagccatggtgggagtggcctggacctgccctgggccacactgaccctgatacaggcatggcagaagaatgggaatattttatactgacagaaatcagtaatatttatatatttatatttttaaaatatttatttatttatttatttaagttcatattccatatttattcaagatgttttaccgtaataattattattaaaaatatgcttcta

SEQ ID NO: 163 - protein, 144 aa, Homo sapiens
MWLQSLLLLGTVACSISAPARSPSPSTQPWEHVNAIQEARRLLNLSRDTAAEMNETVEVISEMFDLQEPTCLQTRLELYKQGLRGSLTKLKGPLTMMASHYKQHCPPTPETSCATQIITFESFKENLKDFLLVIPFDCWEPVQE

SEQ ID NO: 164 - DNA, 921 bp, Homo sapiens
ttctatgcaaagcaaaaagccagcagcagccccaagctgataagattaatctaaagagcaaattatggtgtaatttcctatgctgaaactttgtagttaattttttaaaaaggtttcattttcctattggtctgatttcacaggaacattttacctgtttgtgaggcattttttctcctggaagagaggtgctgattggccccaagtgactgacaatctggtgtaacgaaaatttccaatgtaaactcattttccctcggtttcagcaattttaaatctatatatagagatatctttgtcagcattgcatcgttagcttctcctgataaactaattgcctcacattgtcactgcaaatcgacacctattaatgggtctcacctcccaactgcttccccctctgttcttcctgctagcatgtgccggcaactttgtccacggacacaagtgcgatatcaccttacaggagatcatcaaaactttgaacagcctcacagagcagaagactctgtgcaccgagttgaccgtaacagacatctttgctgcctccaagaacacaactgagaaggaaaccttctgcagggctgcgactgtgctccggcagttctacagccaccatgagaaggacactcgctgcctgggtgcgactgcacagcagttccacaggcacaagcagctgatccgattcctgaaacggctcgacaggaacctctggggcctggcgggcttgaattcctgtcctgtgaaggaagccaaccagagtacgttggaaaacttcttggaaaggctaaagacgatcatgagagagaaatattcaaagtgttcgagctgaatattttaatttatgagtttttgatagctttattttttaagtatttatatatttataactcatcataaaataaagtatatatagaatct

SEQ ID NO: 165 - protein, 153 aa, Homo sapiens [sequence omitted]

SEQ ID NO: 166 - DNA, 1629 bp, Homo sapiens
acacatcaggggcttgctcttgcaaaaccaaaccacaagacagacttgcaaaagaaggcatgcacagctcagcactgctctgttgcctggtcctcctgactggggtgagggccagcccaggccagggcacccagtctgagaacagctgcacccacttcccaggcaacctgcctaacatgcttcgagatctccgagatgccttcagcagagtgaagactttctttcaaatgaaggatcagctggacaacttgttgttaaaggagtccttgctggaggactttaagggttacctgggttgccaagccttgtctgagatgatccagttttacctggaggaggtgatgccccaagctgagaaccaagacccagacatcaaggcgcatgtgaactccctgggggagaacctgaagaccctcaggctgaggctacggcgctgtcatcgatttcttccctgtgaaaacaagagcaaggccgtggagcaggtgaagaatgcctttaataagctccaagagaaaggcatctacaaagccatgagtgagtttgacatcttcatcaactacatagaagcctacatgacaatgaagatacgaaactgagacatcagggtggcgactctatagactctaggacataaattagaggtctccaaaatcggatctggggctctgggatagctgacccagccccttgagaaaccttattgtacctctcttatagaatatttattacctctgatacctcaacccccatttctatttatttactgagcttctctgtgaacgatttagaaagaagcccaatattataatttttttcaatatttattattttcacctgtttttaagctgtttccatagggtgacacactatggtatttgagtgttttaagataaattataagttacataagggaggaaaaaaaatgttctttggggagccaacagaagcttccattccaagcctgaccacgctttctagctgttgagctgttttccctgacctccctctaatttatcttgtctctgggcttggggcttcctaactgctacaaatactcttaggaagagaaaccagggagcccctttgatgattaattcaccttccagtgtctcggagggattcccctaacctcattccccaaccacttcattcttgaaagctgtggccagcttgttatttataacaacctaaatttggttctaggccgggcgcggtggctcacgcctgtaatcccagcactttgggaggctgaggcgggtggatcacttgaggtcaggagttcctaaccagcctggtcaacatggtgaaaccccgtctctactaaaaatacaaaaattagccgggcatggtggcgcgcacctgtaatcccagctacttgggaggctgaggcaagagaattgcttgaacccaggagatggaagttgcagtgagctgatatcatgcccctgtactccagcctgggtgacagagcaagactctgtctcaaaaaataaaaataaaaataaatttggttctaatagaactcagttttaactagaatttattcaattcctctgggaatgttacattgtttgtctgtcttcatagcagattttaattttgaataaataaatgtatcttattcacatc

SEQ ID NO: 167 - protein, 178 aa, Homo sapiens
MHSSALLCCLVLLTGVRASPGQGTQSENSCTHFPGNLPNMLRDLRDAFSRVKTFFQMKDQLDNLLLKESLLEDFKGYLGCQALSEMIQFYLEEVMPQAENQDPDIKAHVNSLGENLKTLRLRLRRCHRFLPCENKSKAVEQVKNAFNKLQEKGIYKAMSEFDIFINYIEAYMTMKIRN

SEQ ID NO: 168 - DNA, 1282 bp, Homo sapiens
aagccacccagcctatgcatccgctcctcaatcctctcctgttggcactgggcctcatggcgcttttgttgaccacggtcattgctctcacttgccttggcggctttgcctccccaggccctgtgcctccctctacagccctcagggagctcattgaggagctggtcaacatcacccagaaccagaaggctccgctctgcaatggcagcatggtatggagcatcaacctgacagctggcatgtactgtgcagccctggaatccctgatcaacgtgtcaggctgcagtgccatcgagaagacccagaggatgctgagcggattctgcccgcacaaggtctcagctgggcagttttccagcttgcatgtccgagacaccaaaatcgaggtggcccagtttgtaaaggacctgctcttacatttaaagaaactttttcgcgagggacagttcaactgaaacttcgaaagcatcattatttgcagagacaggacctgactattgaagttgcagattcatttttctttctgatgtcaaaaatgtcttgggtaggcgggaaggagggttagggaggggtaaaattccttagcttagacctcagcctgtgctgcccgtcttcagcctagccgacctcagccttccccttgcccagggctcagcctggtgggcctcctctgtccagggccctgagctcggtggacccagggatgacatgtccctacacccctcccctgccctagagcacactgtagcattacagtgggtgccccccttgccagacatgtggtgggacagggacccacttcacacacaggcaactgaggcagacagcagctcaggcacacttcttcttggtcttatttattattgtgtgttatttaaatgagtgtgtttgtcaccgttggggattggggaagactgtggctgctagcacttggagccaagggttcagagactcagggccccagcactaaagcagtggacaccaggagtccctggtaataagtactgtgtacagaattctgctacctcactggggtcctggggcctcggagcctcatccgaggcagggtcaggagaggggcagaacagccgctcctgtctgccagccagcagccagctctcagccaacgagtaatttattgtttttccttgtatttaaatattaaatatgttagcaaagagttaatatatagaagggtaccttgaacactgggggaggggacattgaacaagttgtttcattgactatcaaactgaagccagaaataaagttggtgacagat

SEQ ID NO: 169 - protein, 146 aa, Homo sapiens
MHPLLNPLLLALGLMALLLTTVIALTCLGGFASPGPVPPSTALRELIEELVNITQNQKAPLCNGSMVWSINLTAGMYCAALESLINVSGCSAIEKTQRMLSGFCPHKVSAGQFSSLHVRDTKIEVAQFVKDLLLHLKKLFREGQFN

SEQ ID NO: 170 - DNA, 1444 bp, Homo sapiens
tttcattttgggccgagctggaggcggcggggccgtcccggaacggctgcggccgggcaccccgggagttaatccgaaagcgccgcaagccccgcgggccggccgcaccgcacgtgtcaccgagaagctgatgtagagagagacacagaaggagacagaaagcaagagaccagagtcccgggaaagtcctgccgcgcctcgggacaattataaaaatgtggccccctgggtcagcctcccagccaccgccctcacctgccgcggccacaggtctgcatccagcggctcgccctgtgtccctgcagtgccggctcagcatgtgtccagcgcgcagcctcctccttgtggctaccctggtcctcctggaccacctcagtttggccagaaacctccccgtggccactccagacccaggaatgttcccatgccttcaccactcccaaaacctgctgagggccgtcagcaacatgctccagaaggccagacaaactctagaattttacccttgcacttctgaagagattgatcatgaagatatcacaaaagataaaaccagcacagtggaggcctgtttaccattggaattaaccaagaatgagagttgcctaaattccagagagacctctttcataactaatgggagttgcctggcctccagaaagacctcttttatgatggccctgtgccttagtagtatttatgaagacttgaagatgtaccaggtggagttcaagaccatgaatgcaaagcttctgatggatcctaagaggcagatctttctagatcaaaacatgctggcagttattgatgagctgatgcaggccctgaatttcaacagtgagactgtgccacaaaaatcctcccttgaagaaccggatttttataaaactaaaatcaagctctgcatacttcttcatgctttcagaattcgggcagtgactattgatagagtgatgagctatctgaatgcttcctaaaaagcgaggtccctccaaaccgttgtcatttttataaaactttgaaatgaggaaactttgataggatgtggattaagaactagggagggggaaagaaggatgggactattacatccacatgatacctctgatcaagtatttttgacatttactgtggataaattgtttttaagttttcatgaatgaattgctaagaagggaaaatatccatcctgaaggtgtttttcattcactttaatagaagggcaaatatttataagctatttctgtaccaaagtgtttgtggaaacaaacatgtaagcataacttattttaaaatatttatttatataacttggtaatcatgaaagcatctgagctaacttatatttatttatgttatatttattaaattatttatcaagtgtatttgaaaaatatttttaagtgttctaaaaataaaagtattgaattaaagtgaaaaaaaa

SEQ ID NO: 171 - protein, 253 aa, Homo sapiens
MWPPGSASQPPPSPAAATGLHPAARPVSLQCRLSMCPARSLLLVATLVLLDHLSLARNLPVATPDPGMFPCLHHSQNLLRAVSNMLQKARQTLEFYPCTSEEIDHEDITKDKTSTVEACLPLELTKNESCLNSRETSFITNGSCLASRKTSFMMALCLSSIYEDLKMYQVEFKTMNAKLLMDPKRQIFLDQNMLAVIDELMQALNFNSETVPQKSSLEEPDFYKTKIKLCILLHAFRIRAVTIDRVMSYLNAS

SEQ ID NO: 172 - DNA, 876 bp, Homo sapiens
agaacctagagcccaaggttcagagtcacccatctcagcaagcccagaagtatctgcaatatctacgatggcctcgccctttgctttactgatggtcctggtggtgctcagctgcaagtcaagctgctctctgggctgtgatctccctgagacccacagcctggataacaggaggaccttgatgctcctggcacaaatgagcagaatctctccttcctcctgtctgatggacagacatgactttggatttccccaggaggagtttgatggcaaccagttccagaaggctccagccatctctgtcctccatgagctgatccagcagatcttcaacctctttaccacaaaagattcatctgctgcttgggatgaggacctcctagacaaattctgcaccgaactctaccagcagctgaatgacttggaagcctgtgtgatgcaggaggagagggtgggagaaactcccctgatgaatgcggactccatcttggctgtgaagaaatacttccgaagaatcactctctatctgacagagaagaaatacagcccttgtgcctgggaggttgtcagagcagaaatcatgagatccctctctttatcaacaaacttgcaagaaagattaaggaggaaggaataacatctggtccaacatgaaaacaattcttattgactcatacaccaggtcacgctttcatgaattctgtcatttcaaagactctcacccctgctataactatgaccatgctgataaactgatttatctatttaaatatttatttaactattcataagatttaaattatttttgttcatataacgtcatgtgcacctttacactgtggttagtgtaataaaacatgttccttatatttactc

SEQ ID NO: 173 - protein, 189 aa, Homo sapiens
MASPFALLMVLVVLSCKSSCSLGCDLPETHSLDNRRTLMLLAQMSRISPSSCLMDRHDFGFPQEEFDGNQFQKAPAISVLHELIQQIFNLFTTKDSSAAWDEDLLDKFCTELYQQLNDLEACVMQEERVGETPLMNADSILAVKKYFRRITLYLTEKKYSPCAWEVVRAEIMRSLSLSTNLQERLRRKE

SEQ ID NO: 174 - DNA, 2745 bp, Homo sapiens
acctccctccgcggagcagccagacagcgagggccccggccgggggcaggggggacgccccgtccggggcaccccccccggctctgagccgcccgcggggccggcctcggcccggagcggaggaaggagtcgccgaggagcagcctgaggccccagagtctgagacgagccgccgccgcccccgccactgcggggaggagggggaggaggagcgggaggagggacgagctggtcgggagaagaggaaaaaaacttttgagacttttccgttgccgctgggagccggaggcgcggggacctcttggcgcgacgctgccccgcgaggaggcaggacttggggaccccagaccgcctccctttgccgccggggacgcttgctccctccctgccccctacacggcgtccctcaggcgcccccattccggaccagccctcgggagtcgccgacccggcctcccgcaaagacttttccccagacctcgggcgcaccccctgcacgccgccttcatccccggcctgtctcctgagcccccgcgcatcctagaccctttctcctccaggagacggatctctctccgacctgccacagatcccctattcaagaccacccaccttctggtaccagatcgcgcccatctaggttatttccgtgggatactgagacacccccggtccaagcctcccctccaccactgcgcccttctccctgaggagcctcagctttccctcgaggccctcctaccttttgccgggagacccccagcccctgcaggggcggggcctccccaccacaccagccctgttcgcgctctcggcagtgccggggggcgccgcctcccccatgccgccctccgggctgcggctgctgccgctgctgctaccgctgctgtggctactggtgctgacgcctggcccgccggccgcgggactatccacctgcaagactatcgacatggagctggtgaagcggaagcgcatcgaggccatccgcggccagatcctgtccaagctgcggctcgccagccccccgagccagggggaggtgccgcccggcccgctgcccgaggccgtgctcgccctgtacaacagcacccgcgaccgggtggccggggagagtgcagaaccggagcccgagcctgaggccgactactacgccaaggaggtcacccgcgtgctaatggtggaaacccacaacgaaatctatgacaagttcaagcagagtacacacagcatatatatgttcttcaacacatcagagctccgagaagcggtacctgaacccgtgttgctctcccgggcagagctgcgtctgctgaggaggctcaagttaaaagtggagcagcacgtggagctgtaccagaaatacagcaacaattcctggcgatacctcagcaaccggctgctggcacccagcgactcgccagagtggttatcttttgatgtcaccggagttgtgcggcagtggttgagccgtggaggggaaattgagggctttcgccttagcgcccactgctcctgtgacagcagggataacacactgcaagtggacatcaacgggttcactaccggccgccgaggtgacctggccaccattcatggcatgaaccggcctttcctgcttctcatggccaccccgctggagagggcccagcatctgcaaagctcccggcaccgccgagccctggacaccaactattgcttcagctccacggagaagaactgctgcgtgcggcagctgtacattgacttccgcaaggacctcggctggaagtggatccacgagcccaagggctaccatgccaacttctgcctcgggccctgcccctacatttggagcctggacacgcagtacagcaaggtcctggccctgtacaaccagcataacccgggcgcctcggcggcgccgtgctgcgtgccgcaggcgctggagccgctgcccatcgtgtactacgtgggccgcaagcccaaggtggagcagctgtccaacatgatcgtgcgctcctgcaagtgcagctgaggtcccgccccgccccgccccgccccggcaggcccggccccaccccgccccgcccccgctgccttgcccatgggggctgtatttaaggacaccgtgccccaagcccacctggggccccattaaagatggagagaggactgcggatctctgtgtcattgggcgcctgcctggggtctccatccctgacgttcccccactcccactccctctctctccctctctgcctcctcctgcctgtctgcactattcctttgcccggcatcaaggcacaggggaccagtggggaacactactgtagttagatctatttattgagcaccttgggcactgttgaagtgccttacattaatgaactcattcagtcaccatagcaacactctgagatggcagggactctgataacacccattttaaaggttgaggaaacaagcccagagaggttaagggaggagttcctgcccaccaggaacctgctttagtgggggatagtgaagaagacaataaaagatagtagttcaggccaggcggggtgctcacgcctgtaatcctagcacttttgggaggcagagatgggaggatacttgaatccaggcatttgagaccagcctgggtaacatagtgagaccctatctctacaaaacacttttaaaaaatgtacacctgtggtcccagctactctggaggctaaggtgggaggatcacttgatcctgggaggtcaaggctgcag

SEQ ID NO: 175 - protein, 391 aa, Homo sapiens
MPPSGLRLLPLLLPLLWLLVLTPGPPAAGLSTCKTIDMELVKRKRIEAIRGQILSKLRLASPPSQGEVPPGPLPEAVLALYNSTRDRVAGESAEPEPEPEADYYAKEVTRVLMVETHNEIYDKFKQSTHSIYMFFNTSELREAVPEPVLLSRAELRLLRRLKLKVEQHVELYQKYSNNSWRYLSNRLLAPSDSPEWLSFDVTGVVRQWLSRGGEIEGFRLSAHCSCDSRDNTLQVDINGFTTGRRGDLATIHGMNRPFLLLMATPLERAQHLQSSRHRRALDTNYCFSSTEKNCCVRQLYIDFRKDLGWKWIHEPKGYHANFCLGPCPYIWSLDTQYSKVLALYNQHNPGASAAPCCVPQALEPLPIVYYVGRKPKVEQLSNMIVRSCKCS

SEQ ID NO: 176 - DNA, 3119 bp, Homo sapiens
cgcggtatctgcatcgggcctcactggcttcaggagctgaataccctcccaggcacacacaggtgggacacaaataagggttttggaaccactattttctcatcacgacagcaacttaaaatgcctgggaagatggtcgtgatccttggagcctcaaatatactttggataatgtttgcagcttctcaagcttttaaaatcgagaccaccccagaatctagatatcttgctcagattggtgactccgtctcattgacttgcagcaccacaggctgtgagtccccatttttctcttggagaacccagatagatagtccactgaatgggaaggtgacgaatgaggggaccacatctacgctgacaatgaatcctgttagttttgggaacgaacactcttacctgtgcacagcaacttgtgaatctaggaaattggaaaaaggaatccaggtggagatctactcttttcctaaggatccagagattcatttgagtggccctctggaggctgggaagccgatcacagtcaagtgttcagttgctgatgtatacccatttgacaggctggagatagacttactgaaaggagatcatctcatgaagagtcaggaatttctggaggatgcagacaggaagtccctggaaaccaagagtttggaagtaacctttactcctgtcattgaggatattggaaaagttcttgtttgccgagctaaattacacattgatgaaatggattctgtgcccacagtaaggcaggctgtaaaagaattgcaagtctacatatcacccaagaatacagttatttctgtgaatccatccacaaagctgcaagaaggtggctctgtgaccatgacctgttccagcgagggtctaccagctccagagattttctggagtaagaaattagataatgggaatctacagcacctttctggaaatgcaactctcaccttaattgctatgaggatggaagattctggaatttatgtgtgtgaaggagttaatttgattgggaaaaacagaaaagaggtggaattaattgttcaagagaaaccatttactgttgagatctcccctggaccccggattgctgctcagattggagactcagtcatgttgacatgtagtgtcatgggctgtgaatccccatctttctcctggagaacccagatagacagccctctgagcgggaaggtgaggagtgaggggaccaattccacgctgaccctgagccctgtgagttttgagaacgaacactcttatctgtgcacagtgacttgtggacataagaaactggaaaagggaatccaggtggagctctactcattccctagagatccagaaatcgagatgagtggtggcctcgtgaatgggagctctgtcactgtaagctgcaaggttcctagcgtgtacccccttgaccggctggagattgaattacttaagggggagactattctggagaatatagagtttttggaggatacggatatgaaatctctagagaacaaaagtttggaaatgaccttcatccctaccattgaagatactggaaaagctcttgtttgtcaggctaagttacatattgatgacatggaattcgaacccaaacaaaggcagagtacgcaaacactttatgtcaatgttgcccccagagatacaaccgtcttggtcagcccttcctccatcctggaggaaggcagttctgtgaatatgacatgcttgagccagggctttcctgctccgaaaatcctgtggagcaggcagctccctaacggggagctacagcctctttctgagaatgcaactctcaccttaatttctacaaaaatggaagattctggggtttatttatgtgaaggaattaaccaggctggaagaagcagaaaggaagtggaattaattatccaagttactccaaaagacataaaacttacagcttttccttctgagagtgtcaaagaaggagacactgtcatcatctcttgtacatgtggaaatgttccagaaacatggataatcctgaagaaaaaagcggagacaggagacacagtactaaaatctatagatggcgcctataccatccgaaaggcccagttgaaggatgcgggagtatatgaatgtgaatctaaaaacaaagttggctcacaattaagaagtttaacacttgatgttcaaggaagagaaaacaacaaagactatttttctcctgagcttctcgtgctctattttgcatcctccttaataatacctgccattggaatgataatttactttgcaagaaaagccaacatgaaggggtcatatagtcttgtagaagcacagaaatcaaaagtgtagctaatgcttgatatgttcaactggagacactatttatctgtgcaaatccttgatactgctcatcattccttgagaaaaacaatgagctgagaggcagacttccctgaatgtattgaacttggaaagaaatgcccatctatgtcccttgctgtgagcaagaagtcaaagtaaaacttgctgcctgaagaacagtaactgccatcaagatgagagaactggaggagttccttgatctgtatatacaataacataatttgtacatatgtaaaataaaattatgccatagcaagattgcttaaaatagcaacactctatatttagattgttaaaataactagtgttgcttggactattataatttaatgcatgttaggaaaatttcacattaatatttgctgacagctgacctttgtcatctttcttctattttattccctttcacaaaattttattcctatatagtttattgacaataatttcaggttttgtaaagatgccgggttttatatttttatagacaaataataagcaaagggagcactgggttgactttcaggtactaaatacctcaacctatggtataatggttgactgggtttctctgtatagtactggcatggtacggagatgtttcacgaagtttgttcatcagactcctgtgcaactttcccaatgtggcctaaaaatgcaacttctttttattttcttttgtaaatgtttaggtttttttgtatagtaaagtgataatttctggaattagaaaaaaaaaaaaaaaaaaa

SEQ ID NO: 177 - protein, 739 aa, Homo sapiens
MPGKMVVILGASNILWIMFAASQAFKIETTPESRYLAQIGDSVSLTCSTTGCESPFFSWRTQIDSPLNGKVTNEGTTSTLTMNPVSFGNEHSYLCTATCESRKLEKGIQVEIYSFPKDPEIHLSGPLEAGKPITVKCSVADVYPFDRLEIDLLKGDHLMKSQEFLEDADRKSLETKSLEVTFTPVIEDIGKVLVCRAKLHIDEMDSVPTVRQAVKELQVYISPKNTVISVNPSTKLQEGGSVTMTCSSEGLPAPEIFWSKKLDNGNLQHLSGNATLTLIAMRMEDSGIYVCEGVNLIGKNRKEVELIVQEKPFTVEISPGPRIAAQIGDSVMLTCSVMGCESPSFSWRTQIDSPLSGKVRSEGTNSTLTLSPVSFENEHSYLCTVTCGHKKLEKGIQVELYSFPRDPEIEMSGGLVNGSSVTVSCKVPSVYPLDRLEIELLKGETILENIEFLEDTDMKSLENKSLEMTFIPTIEDTGKALVCQAKLHIDDMEFEPKQRQSTQTLYVNVAPRDTTVLVSPSSILEEGSSVNMTCLSQGFPAPKILWSRQLPNGELQPLSENATLTLISTKMEDSGVYLCEGINQAGRSRKEVELIIQVTPKDIKLTAFPSESVKEGDTVIISCTCGNVPETWIILKKKAETGDTVLKSIDGAYTIRKAQLKDAGVYECESKNKVGSQLRSLTLDVQGRENNKDYFSPELLVLYFASSLIIPAIGMIIYFARKANMKGSYSLVEAQKSKV

SEQ ID NO: 178 - DNA, 4341 bp, Homo sapiens
gaaactaggggcaaggagacgaagagaacatgaaagttaaactttaagatgaagaacaaagctgaacatactgatgcattggatctttggagaggatctcagaactcattgtacttaatttacaggctaaaaccttagaagaggaatttattatatcctacacaagactccagggaagcacatggccttggactgaaggctggcatctggaagctgtcagccaccagcaccttctgcagcaggaaaaggccagggctctgctggagcaggcagcagagtggacgcacagtaacatgggcaacttgaagagcgtggcccaggagcctgggccaccctgcggcctggggctggggctgggccttgggctgtgcggcaagcagggcccagccaccccggcccctgagcccagccgggccccagcatccctactcccaccagcgccagaacacagccccccgagctccccgctaacccagcccccagaggggcccaagttccctcgtgtgaagaactgggaggtggggagcatcacctatgacaccctcagcgcccaggcgcagcaggatgggccctgcaccccaagacgctgcctgggctccctggtatttccacggaaactacagggccggccctcccccggccccccggcccctgagcagctgctgagtcaggcccgggacttcatcaaccagtactacagctccattaagaggagcggctcccaggcccacgaacagcggcttcaagaggtggaagccgaggtggcagccacaggcacctaccagcttagggagagcgagctggtgttcggggctaagcaggcctggcgcaacgctccccgctgcgtgggccggatccagtgggggaagctgcaggtgttcgatgcccgggactgcaggtctgcacaggaaatgttcacctacatctgcaaccacatcaagtatgccaccaaccggggcaaccttcgctcggccatcacagtgttcccgcagcgctgccctggccgaggagacttccgaatctggaacagccagctggtgcgctacgcgggctaccggcagcaggatggctctgtgcggggggacccagccaacgtggagatcaccgagctctgcattcagcacggctggaccccaggaaacggtcgcttcgacgtgctgcccctgctgctgcaggccccagatgatcccccagaactcttccttctgccccccgagctggtccttgaggtgcccctggagcaccccacgctggagtggtttgcagccctgggcctgcgctggtacgccctcccggcagtgtccaacatgctgctggaaattgggggcctggagttccccgcagcccccttcagtggctggtacatgagcactgagatcggcacgaggaacctgtgtgaccctcaccgctacaacatcctggaggatgtggctgtctgcatggacctggatacccggaccacctcgtccctgtggaaagacaaggcagcagtggaaatcaacgtggccgtgctgcacagttaccagctagccaaagtcaccatcgtggaccaccacgccgccacggcctctttcatgaagcacctggagaatgagcagaaggccagggggggctgccctgcagactgggcctggatcgtgccccccatctcgggcagcctcactcctgttttccatcaggagatggtcaactatttcctgtccccggccttccgctaccagccagacccctggaaggggagtgccgccaagggcaccggcatcaccaggaagaagacctttaaagaagtggccaacgccgtgaagatctccgcctcgctcatgggcacggtgatggcgaagcgagtgaaggcgacaatcctgtatggctccgagaccggccgggcccagagctacgcacagcagctggggagactcttccggaaggcttttgatccccgggtcctgtgtatggatgagtatgacgtggtgtccctcgaacacgagacgctggtgctggtggtaaccagcacatttgggaatggggatcccccggagaatggagagagctttgcagctgccctgatggagatgtccggcccctacaacagctcccctcggccggaacagcacaagagttataagatccgcttcaacagcatctcctgctcagacccactggtgtcctcttggcggcggaagaggaaggagtccagtaacacagacagtgcaggggccctgggcaccctcaggttctgtgtgttcgggctcggctcccgggcatacccccacttctgcgcctttgctcgtgccgtggacacacggctggaggaactgggcggggagcggctgctgcagctgggccagggcgacgagctgtgcggccaggaggaggccttccgaggctgggcccaggctgccttccaggccgcctgtgagaccttctgtgtgggagaggatgccaaggccgccgcccgagacatcttcagccccaaacggagctggaagcgccagaggtaccggctgagcgcccaggccgagggcctgcagttgctgccaggtctgatccacgtgcacaggcggaagatgttccaggctacaatccgctcagtggaaaacctgcaaagcagcaagtccacgagggccaccatcctggtgcgcctggacaccggaggccaggaggggctgcagtaccagccgggggaccacataggtgtctgcccgcccaaccggcccggccttgtggaggcgctgctgagccgcgtggaggacccgccggcgcccactgagcccgtggcagtagagcagctggagaagggcagccctggtggccctccccccggctgggtgcgggacccccggctgcccccgtgcacgctgcgccaggctctcaccttcttcctggacatcacctccccacccagccctcagctcttgcggctgctcagcaccttggcagaagagcccagggaacagcaggagctggaggccctcagccaggatccccgacgctacgaggagtggaagtggttccgctgccccacgctgctggaggtgctggagcagttcccgtcggtggcgctgcctgccccactgctcctcacccagctgcctctgctccagccccggtactactcagtcagctcggcacccagcacccacccaggagagatccacctcactgtagctgtgctggcatacaggactcaggatgggctgggccccctgcactatggagtctgctccacgtggctaagccagctcaagcccggagaccctgtgccctgcttcatccggggggctccctccttccggctgccacccgatcccagcttgccctgcatcctggtgggtccaggcactggcattgcccccttccggggattctggcaggagcggctgcatgacattgagagcaaagggctgcagcccactcccatgactttggtgttcggctgccgatgctcccaacttgaccatctctaccgcgacgaggtgcagaacgcccagcagcgcggggtgtttggccgagtcctcaccgccttctcccgggaacctgacaaccccaagacctacgtgcaggacatcctgaggacggagctggctgcggaggtgcaccgcgtgctgtgcctcgagcggggccacatgtttgtctgcggcgatgttaccatggcaaccaacgtcctgcagaccgtgcagcgcatcctggcgacggagggcgacatggagctggacgaggccggcgacgtcatcggcgtgctgcgggatcagcaacgctaccacgaagacattttcgggctcacgctgcgcacccaggaggtgacaagccgcatacgcacccagagcttttccttgcaggagcgtcagttgcggggcgcagtgccctgggcgttcgaccctcccggctcagacaccaacagcccctgagagccgcctggctttcccttccagttccgggagagcggctgcccgactcaggtccgcccgaccaggatcagccccgctcctcccctcttgaggtggtgccttctcacatctgtccagaggctgcaaggattcagcattattcctccaggaaggagcaaaacgcctcttttccctctctaggcctgttgcctcgggcctgggtccgccttaatctggaaggcccctcccagcagcggtaccccagggcctactgccacccgcttcctgtttcttagtcgaatgttagattcctcttgcctctctcaggagtatcttacctgtaaagtctaatctctaaatcaagtatttattattgaagatttaccataagggactgtgccagatgttaggagaactactaaagtgcctaccccagctcaaaaaaaaaaaaaaaaaa

SEQ ID NO: 179 - protein, 1203 aa, Homo sapiens
MGNLKSVAQEPGPPCGLGLGLGLGLCGKQGPATPAPEPSRAPASLLPPAPEHSPPSSPLTQPPEGPKFPRVKNWEVGSITYDTLSAQAQQDGPCTPRRCLGSLVFPRKLQGRPSPGPPAPEQLLSQARDFINQYYSSIKRSGSQAHEQRLQEVEAEVAATGTYQLRESELVFGAKQAWRNAPRCVGRIQWGKLQVFDARDCRSAQEMFTYICNHIKYATNRGNLRSAITVFPQRCPGRGDFRIWNSQLVRYAGYRQQDGSVRGDPANVEITELCIQHGWTPGNGRFDVLPLLLQAPDDPPELFLLPPELVLEVPLEHPTLEWFAALGLRWYALPAVSNMLLEIGGLEFPAAPFSGWYMSTEIGTRNLCDPHRYNILEDVAVCMDLDTRTTSSLWKDKAAVEINVAVLHSYQLAKVTIVDHHAATASFMKHLENEQKARGGCPADWAWIVPPISGSLTPVFHQEMVNYFLSPAFRYQPDPWKGSAAKGTGITRKKTFKEVANAVKISASLMGTVMAKRVKATILYGSETGRAQSYAQQLGRLFRKAFDPRVLCMDEYDVVSLEHETLVLVVTSTFGNGDPPENGESFAAALMEMSGPYNSSPRPEQHKSYKIRFNSISCSDPLVSSWRRKRKESSNTDSAGALGTLRFCVFGLGSRAYPHFCAFARAVDTRLEELGGERLLQLGQGDELCGQEEAFRGWAQAAFQAACETFCVGEDAKAAARDIFSPKRSWKRQRYRLSAQAEGLQLLPGLIHVHRRKMFQATIRSVENLQSSKSTRATILVRLDTGGQEGLQYQPGDHIGVCPPNRPGLVEALLSRVEDPPAPTEPVAVEQLEKGSPGGPPPGWVRDPRLPPCTLRQALTFFLDITSPPSPQLLRLLSTLAEEPREQQELEALSQDPRRYEEWKWFRCPTLLEVLEQFPSVALPAPLLLTQLPLLQPRYYSVSSAPSTHPGEIHLTVAVLAYRTQDGLGPLHYGVCSTWLSQLKPGDPVPCFIRGAPSFRLPPDPSLPCILVGPGTGIAPFRGFWQERLHDIESKGLQPTPMTLVFGCRCSQLDHLYRDEVQNAQQRGVFGRVLTAFSREPDNPKTYVQDILRTELAAEVHRVLCLERGHMFVCGDVTMATNVLQTVQRILATEGDMELDEAGDVIGVLRDQQRYHEDIFGLTLRTQEVTSRIRTQSFSLQERQLRGAVPWAFDPPGSDTNSP

SEQ ID NO: 180 - DNA, 4950 bp, Homo sapiens
aaccacgatgtctttggcacagcctctcatctgtcagatgggagcggggaccccggagagggagtcagccgaggtcctggcattccttgtgaacccccgtctgtgggtttctggtccagtgtcccttctccagattagatggcttaggcctcctctaagggggtgggcgtgcacatccggagagctgtctggtgtgcaggactgggctgcaggttaccctgaactgcaaccatcttagagcaaggcccagcttgcagcaggaggagctgcaggccgcccaccctagccacggcccctgccctggcaggaagcttccaagagtaaacactgcctaatcgtcccgcccagtagtgagcaggcctgtcccattccatactgaccagattcccagtcaccaaggccccctctcactccgctccactcctcgggctggctctcctgaggatgcaccagcgtcacccccgggcaagatgccctcccctctgtgtggccggaatccttgcctgtggctttctcctgggctgctggggaccctcccatttccagcagagttgtcttcaggctttggagccacaggccgtgtcttcttacttgagccctggtgctcccttaaaaggccgccctccttcccctggcttccagaggcagaggcagaggcagaggcgggctgcaggcggcatcctacacctggagctgctggtggccgtgggccccgatgtcttccaggctcaccaggaggacacagagcgctatgtgctcaccaacctcaacatcggggcagaactgcttcgggacccgtccctgggggctcagtttcgggtgcacctggtgaagatggtcattctgacagagcctgagggtgctccaaatatcacagccaacctcacctcgtccctgctgagcgtctgtgggtggagccagaccatcaaccctgaggacgacacggatcctggccatgctgacctggtcctctatatcactaggtttgacctggagttgcctgatggtaaccggcaggtgcggggcgtcacccagctgggcggtgcctgctccccaacctggagctgcctcattaccgaggacactggcttcgacctgggagtcaccattgcccatgagattgggcacagcttcggcctggagcacgacggcgcgcccggcagcggctgcggccccagcggacacgtgatggcttcggacggcgccgcgccccgcgccggcctcgcctggtccccctgcagccgccggcagctgctgagcctgctcagcgcaggacgggcgcgctgcgtgtgggacccgccgcggcctcaacccgggtccgcggggcacccgccggatgcgcagcctggcctctactacagcgccaacgagcagtgccgcgtggccttcggccccaaggctgtcgcctgcaccttcgccagggagcacctggatatgtgccaggccctctcctgccacacagacccgctggaccaaagcagctgcagccgcctcctcgttcctctcctggatgggacagaatgtggcgtggagaagtggtgctccaagggtcgctgccgctccctggtggagctgacccccatagcagcagtgcatgggcgctggtctagctggggtccccgaagtccttgctcccgctcctgcggaggaggtgtggtcaccaggaggcggcagtgcaacaaccccagacctgcctttggggggcgtgcatgtgttggtgctgacctccaggccgagatgtgcaacactcaggcctgcgagaagacccagctggagttcatgtcgcaacagtgcgccaggaccgacggccagccgctgcgctcctcccctggcggcgcctccttctaccactggggtgctgctgtaccacacagccaaggggatgctctgtgcagacacatgtgccgggccattggcgagagcttcatcatgaagcgtggagacagcttcctcgatgggacccggtgtatgccaagtggcccccgggaggacgggaccctgagcctgtgtgtgtcgggcagctgcaggacatttggctgtgatggtaggatggactcccagcaggtatgggacaggtgccaggtgtgtggtggggacaacagcacgtgcagcccacggaagggctctttcacagctggcagagcgagagaatatgtcacatttctgacagttacccccaacctgaccagtgtctacattgccaaccacaggcctctcttcacacacttggcggtgaggatcggagggcgctatgtcgtggctgggaagatgagcatctcccctaacaccacctacccctccctcctggaggatggtcgtgtcgagtacagagtggccctcaccgaggaccggctgccccgcctggaggagatccgcatctggggacccctccaggaagatgctgacatccaggtttacaggcggtatggcgaggagtatggcaacctcacccgcccagacatcaccttcacctacttccagcctaagccacggcaggcctgggtgtgggccgctgtgcgtgggccctgctcggtgagctgtggggcagggctgcgctgggtaaactacagctgcctggaccaggccaggaaggagttggtggagactgtccagtgccaagggagccagcagccaccagcgtggccagaggcctgcgtgctcgaaccctgccctccctactgggcggtgggagacttcggcccatgcagcgcctcctgtgggggcggcctgcgggagcggccagtgcgctgcgtggaggcccagggcagcctcctgaagacattgcccccagcccggtgcagagcaggggcccagcagccagctgtggcgctggaaacctgcaacccccagccctgccctgccaggtgggaggtgtcagagcccagctcatgcacatcagctggtggagcaggcctggccttggagaacgagacctgtgtgccaggggcagatggcctggaggctccagtgactgaggggcctggctccgtagatgagaagctgcctgcccctgagccctgtgtcgggatgtcatgtcctccaggctggggccatctggatgccacctctgcaggggagaaggctccctccccatggggcagcatcaggacgggggctcaagctgcacacgtgtggacccctgcggcagggtcgtgctccgtctcctgcgggcgaggtctgatggagctgcgtttcctgtgcatggactctgccctcagggtgcctgtccaggaagagctgtgtggcctggcaagcaagcctgggagccggcgggaggtctgccaggctgtcccgtgccctgctcggtggcagtacaagctggcggcctgcagcgtgagctgtgggagaggggtcgtgcggaggatcctgtattgtgcccgggcccatggggaggacgatggtgaggagatcctgttggacacccagtgccaggggctgcctcgcccggaaccccaggaggcctgcagcctggagccctgcccacctaggtggaaagtcatgtcccttggcccatgttcggccagctgtggccttggcactgctagacgctcggtggcctgtgtgcagctcgaccaaggccaggacgtggaggtggacgaggcggcctgtgcggcgctggtgcggcccgaggccagtgtcccctgtctcattgccgactgcacctaccgctggcatgttggcacctggatggagtgctctgtttcctgtggggatggcatccagcgccggcgtgacacctgcctcggaccccaggcccaggcgcctgtgccagctgatttctgccagcacttgcccaagccggtgactgtgcgtggctgctgggctgggccctgtgtgggacagggtacgcccagcctggtgccccacgaagaagccgctgctccaggacggaccacagccacccctgctggtgcctccctggagtggtcccaggcccggggcctgctcttctccccggctccccagcctcggcggctcctgcccgggccccaggaaaactcagtgcagtccagtgcctgtggcaggcagcaccttgagccaacaggaaccattgacatgcgaggcccagggcaggcagactgtgcagtggccattgggcggcccctcggggaggtggtgaccctccgcgtccttgagagttctctcaactgcagtgcgggggacatgttgctgctttggggccggctcacctggaggaagatgtgcaggaagctgttggacatgactttcagctccaagaccaacacgctggtggtgaggcagcgctgcgggcggccaggaggtggggtgctgctgcggtatgggagccagcttgctcctgaaaccttctacagagaatgtgacatgcagctctttgggccctggggtgaaatcgtgagcccctcgctgagtccagccacgagtaatgcagggggctgccggctcttcattaatgtggctccgcacgcacggattgccatccatgccctggccaccaacatgggcgctgggaccgagggagccaatgccagctacatcttgatccgggacacccacagcttgaggaccacagcgttccatgggcagcaggtgctctactgggagtcagagagcagccaggctgagatggagttcagcgagggcttcctgaaggctcaggccagcctgcggggccagtactggaccctccaatcatgggtaccggagatgcaggaccctcagtcctggaagggaaaggaaggaacctgagggtcattgaacatttgttccgtgtctggccagccctggagggttgacccctggtctcagtgctttccaattcgaactttttccaatcttaggtatctactttagagtcttctccaatgtccaaaaggctagggggttggaggtggggactctggaaaagcagcccccatttcctcgggtaccaataaataaaacatgcaggctgaaaaaaaaaaaaaaaaa

SEQ ID NO: 181 - protein, 1427 aa, Homo sapiens
MHQRHPRARCPPLCVAGILACGFLLGCWGPSHFQQSCLQALEPQAVSSYLSPGAPLKGRPPSPGFQRQRQRQRRAAGGILHLELLVAVGPDVFQAHQEDTERYVLTNLNIGAELLRDPSLGAQFRVHLVKMVILTEPEGAPNITANLTSSLLSVCGWSQTINPEDDTDPGHADLVLYITRFDLELPDGNRQVRGVTQLGGACSPTWSCLITEDTGFDLGVTIAHEIGHSFGLEHDGAPGSGCGPSGHVMASDGAAPRAGLAWSPCSRRQLLSLLSAGRARCVWDPPRPQPGSAGHPPDAQPGLYYSANEQCRVAFGPKAVACTFAREHLDMCQALSCHTDPLDQSSCSRLLVPLLDGTECGVEKWCSKGRCRSLVELTPIAAVHGRWSSWGPRSPCSRSCGGGVVTRRRQCNNPRPAFGGRACVGADLQAEMCNTQACEKTQLEFMSQQCARTDGQPLRSSPGGASFYHWGAAVPHSQGDALCRHMCRAIGESFIMKRGDSFLDGTRCMPSGPREDGTLSLCVSGSCRTFGCDGRMDSQQVWDRCQVCGGDNSTCSPRKGSFTAGRAREYVTFLTVTPNLTSVYIANHRPLFTHLAVRIGGRYVVAGKMSISPNTTYPSLLEDGRVEYRVALTEDRLPRLEEIRIWGPLQEDADIQVYRRYGEEYGNLTRPDITFTYFQPKPRQAWVWAAVRGPCSVSCGAGLRWVNYSCLDQARKELVETVQCQGSQQPPAWPEACVLEPCPPYWAVGDFGPCSASCGGGLRERPVRCVEAQGSLLKTLPPARCRAGAQQPAVALETCNPQPCPARWEVSEPSSCTSAGGAGLALENETCVPGADGLEAPVTEGPGSVDEKLPAPEPCVGMSCPPGWGHLDATSAGEKAPSPWGSIRTGAQAAHVWTPAAGSCSVSCGRGLMELRFLCMDSALRVPVQEELCGLASKPGSRREVCQAVPCPARWQYKLAACSVSCGRGVVRRILYCARAHGEDDGEEILLDTQCQGLPRPEPQEACSLEPCPPRWKVMSLGPCSASCGLGTARRSVACVQLDQGQDVEVDEAACAALVRPEASVPCLIADCTYRWHVGTWMECSVSCGDGIQRRRDTCLGPQAQAPVPADFCQHLPKPVTVRGCWAGPCVGQGTPSLVPHEEAAAPGRTTATPAGASLEWSQARGLLFSPAPQPRRLLPGPQENSVQSSACGRQHLEPTGTIDMRGPGQADCAVAIGRPLGEVVTLRVLESSLNCSAGDMLLLWGRLTWRKMCRKLLDMTFSSKTNTLVVRQRCGRPGGGVLLRYGSQLAPETFYRECDMQLFGPWGEIVSPSLSPATSNAGGCRLFINVAPHARIAIHALATNMGAGTEGANASYILIRDTHSLRTTAFHGQQVLYWESESSQAEMEFSEGFLKAQASLRGQYWTLQSWVPEMQDPQSWKGKEGT

SEQ ID NO: 182 - DNA, 4098 bp, Homo sapiens
gacggtcggctgacaggctccacagagctccactcacgctcaggccctggacggacaggcagtccaacggaacagaaacatccctcagccccacaggcacgatctgttcctcctgggaagatgcagaggctcatgatgctcctcgccacatcgggcgcctgcctgggcctgctggcagtggcagcagtggcagcagcaggtgctaaccctgcccaacgggacacccacagcctgctgcccacccaccggcgccaaaagagagattggatttggaaccagatgcacattgatgaagagaaaaacacctcacttccccatcatgtaggcaagatcaagtcaagcgtgagtcgcaagaatgccaagtacctgctcaaaggagaatatgtgggcaaggtcttccgggtcgatgcagagacaggagacgtgttcgccattgagaggctggaccgggagaatatctcagagtaccacctcactgctgtcattgtggacaaggacactggtgaaaacctggagactccttccagcttcaccatcaaagttcatgacgtgaacgacaactggcctgtgttcacgcatcggttgttcaatgcgtccgtgcctgagtcgtcggctgtggggacctcagtcatctctgtgacagcagtggatgcagacgaccccactgtgggagaccacgcctctgtcatgtaccaaatcctgaaggggaaagagtattttgccatcgataattctggacgtattatcacaataacgaaaagcttggaccgagagaagcaggccaggtatgagatcgtggtggaagcgcgagatgcccagggcctccggggggactcgggcacggccaccgtgctggtcactctgcaagacatcaatgacaacttccccttcttcacccagaccaagtacacatttgtcgtgcctgaagacacccgtgtgggcacctctgtgggctctctgtttgttgaggacccagatgagccccagaaccggatgaccaagtacagcatcttgcggggcgactaccaggacgctttcaccattgagacaaaccccgcccacaacgagggcatcatcaagcccatgaagcctctggattatgaatacatccagcaatacagcttcatcgtcgaggccacagaccccaccatcgacctccgatacatgagccctcccgcgggaaacagagcccaggtcattatcaacatcacagatgtggacgagccccccattttccagcagcctttctaccacttccagctgaaggaaaaccagaagaagcctctgattggcacagtgctggccatggaccctgatgcggctaggcatagcattggatactccatccgcaggaccagtgacaagggccagttcttccgagtcacaaaaaagggggacatttacaatgagaaagaactggacagagaagtctacccctggtataacctgactgtggaggccaaagaactggattccactggaacccccacaggaaaagaatccattgtgcaagtccacattgaagttttggatgagaatgacaatgccccggagtttgccaagccctaccagcccaaagtgtgtgagaacgctgtccatggccagctggtcctgcagatctccgcaatagacaaggacataacaccacgaaacgtgaagttcaaattcaccttgaatactgagaacaactttaccctcacggataatcacgataacacggccaacatcacagtcaagtatgggcagtttgaccgggagcataccaaggtccacttcctacccgtggtcatctcagacaatgggatgccaagtcgcacgggcaccagcacgctgaccgtggccgtgtgcaagtgcaacgagcagggcgagttcaccttctgcgaggatatggccgcccaggtgggcgtgagcatccaggcagtggtagccatcttactctgcatcctcaccatcacagtgatcaccctgctcatcttcctgcggcggcggctccggaagcaggcccgcgcgcacggcaagagcgtgccggagatccacgagcagctggtcacctacgacgaggagggcggcggcgagatggacaccaccagctacgatgtgtcggtgctcaactcggtgcgccgcggcggggccaagcccccgcggcccgcgctggacgcccggccttccctctatgcgcaggtgcagaagccaccgaggcacgcgcctggggcacacggagggcccggggagatggcagccatgatcgaggtgaagaaggacgaggcggaccacgacggcgacggccccccctacgacacgctgcacatctacggctacgagggctccgagtccatagccgagtccctcagctccctgggcaccgactcatccgactctgacgtggattacgacttccttaacgactggggacccaggtttaagatgctggctgagctgtacggctcggacccccgggaggagctgctgtattaggcggccgaggtcactctgggcctggggacccaaaccccctgcagcccaggccagtcagacgccaggcaccacagcctccaaaaatggcagtgactccccagcccagcaccccttcctcgtgggtcccagagacctcatcagccttgggatagcaaactccaggttcctgaaatatccaggaatatatgtcagtgatgactattctcaaatgctggcaaatccaggctggtgttctgtctgggctcagacatccacataaccctgtcacccacagaccgccgtctaactcaaagacttcctctggctccccaaggctgcaaagcaaaacagactgtgtttaactgctgcagggtctttttctagggtccctgaacgccctggtaaggctggtgaggtcctggtgcctatctgcctggaggcaaaggcctggacagcttgacttgtggggcaggattctctgcagcccattcccaagggagactgaccatcatgccctctctcgggagccctagccctgctccaactccatactccactccaagtgccccaccactccccaacccctctccaggcctgtcaagagggaggaaggggccccatggcagctcctgaccttgggtcctgaagtgacctcactggcctgccatgccagtaactgtgctgtactgagcactgaaccacattcagggaaatggcttattaaactttgaagcaactgtgaattcattctggaggggcagtggagatcaggagtgacagatcacagggtgagggccacctccacacccaccccctctggagaaggcctggaagagctgagaccttgctttgagactcctcagcacccctccagttttgcctgagaaggggcagatgttcccggagcagaagacgtctccccttctctgcctcacctggtcgccaatccatgctctctttcttttctctgtctactccttatcccttggtttagaggaacccaagatgtggcctttagcaaaactggacaatgtccaaacccactcatgactgcatgacggagccgagccatgtgtctttacacctcgctgttgtcacatctcagggaactgaccctcaggcacaccttgcagaaggcaaggccctgccctgcccaacctctgtggtcacccatgcatcttccactggaacgtttcactgcaaacacaccttggagaagtggcatcagtcaacagagaggggcagggaaggagacaccaagctcacccttcgtcatggaccgaggttcccactctgggcaaagcccctcacactgcaagggattgtagataacactgacttgtttgttttaaccaataactagcttcttataatgatttttttactaatgatacttacaagtttctagctctcacagacatatagaataagggtttttgcataataagcaggttgttatttaggttaacaatattaattcaggttttttagttggaaaaacaattcctgtaaccttctattttctataattgtagtaattgctctacagataatgtctatatattggccaaactggtgcatgacaagtactgtatttttttatacctaaataaagaaaaatctttagcctgggcaacaaaaaaa

SEQ ID NO: 183 - protein, 784 aa, Homo sapiens
MQRLMMLLATSGACLGLLAVAAVAAAGANPAQRDTHSLLPTHRRQKRDWIWNQMHIDEEKNTSLPHHVGKIKSSVSRKNAKYLLKGEYVGKVFRVDAETGDVFAIERLDRENISEYHLTAVIVDKDTGENLETPSSFTIKVHDVNDNWPVFTHRLFNASVPESSAVGTSVISVTAVDADDPTVGDHASVMYQILKGKEYFAIDNSGRIITITKSLDREKQARYEIVVEARDAQGLRGDSGTATVLVTLQDINDNFPFFTQTKYTFVVPEDTRVGTSVGSLFVEDPDEPQNRMTKYSILRGDYQDAFTIETNPAHNEGIIKPMKPLDYEYIQQYSFIVEATDPTIDLRYMSPPAGNRAQVIINITDVDEPPIFQQPFYHFQLKENQKKPLIGTVLAMDPDAARHSIGYSIRRTSDKGQFFRVTKKGDIYNEKELDREVYPWYNLTVEAKELDSTGTPTGKESIVQVHIEVLDENDNAPEFAKPYQPKVCENAVHGQLVLQISAIDKDITPRNVKFKFTLNTENNFTLTDNHDNTANITVKYGQFDREHTKVHFLPVVISDNGMPSRTGTSTLTVAVCKCNEQGEFTFCEDMAAQVGVSIQAVVAILLCILTITVITLLIFLRRRLRKQARAHGKSVPEIHEQLVTYDEEGGGEMDTTSYDVSVLNSVRRGGAKPPRPALDARPSLYAQVQKPPRHAPGAHGGPGEMAAMIEVKKDEADHDGDGPPYDTLHIYGYEGSESIAESLSSLGTDSSDSDVDYDFLNDWGPRFKMLAELYGSDPREELLY

SEQ ID NO: 184 - DNA, 5777 bp, Homo sapiens
gcggacactcctctcggctcctccccggcagcggcggcggctcggagcgggctccggggctcgggtgcagcggccagcgggcctggcggcgaggattacccggggaagtggttgtctcctggctggagccgcgagacgggcgctcagggcgcggggccggcggcggcgaacgagaggacggactctggcggccgggtcgttggccgggggagcgcgggcaccgggcgagcaggccgcgtcgcgctcaccatggtcagctactgggacaccggggtcctgctgtgcgcgctgctcagctgtctgcttctcacaggatctagttcaggttcaaaattaaaagatcctgaactgagtttaaaaggcacccagcacatcatgcaagcaggccagacactgcatctccaatgcaggggggaagcagcccataaatggtctttgcctgaaatggtgagtaaggaaagcgaaaggctgagcataactaaatctgcctgtggaagaaatggcaaacaattctgcagtactttaaccttgaacacagctcaagcaaaccacactggcttctacagctgcaaatatctagctgtacctacttcaaagaagaaggaaacagaatctgcaatctatatatttattagtgatacaggtagacctttcgtagagatgtacagtgaaatccccgaaattatacacatgactgaaggaagggagctcgtcattccctgccgggttacgtcacctaacatcactgttactttaaaaaagtttccacttgacactttgatccctgatggaaaacgcataatctgggacagtagaaagggcttcatcatatcaaatgcaacgtacaaagaaatagggcttctgacctgtgaagcaacagtcaatgggcatttgtataagacaaactatctcacacatcgacaaaccaatacaatcatagatgtccaaataagcacaccacgcccagtcaaattacttagaggccatactcttgtcctcaattgtactgctaccactcccttgaacacgagagttcaaatgacctggagttaccctgatgaaaaaaataagagagcttccgtaaggcgacgaattgaccaaagcaattcccatgccaacatattctacagtgttcttactattgacaaaatgcagaacaaagacaaaggactttatacttgtcgtgtaaggagtggaccatcattcaaatctgttaacacctcagtgcatatatatgataaagcattcatcactgtgaaacatcgaaaacagcaggtgcttgaaaccgtagctggcaagcggtcttaccggctctctatgaaagtgaaggcatttccctcgccggaagttgtatggttaaaagatgggttacctgcgactgagaaatctgctcgctatttgactcgtggctactcgttaattatcaaggacgtaactgaagaggatgcagggaattatacaatcttgctgagcataaaacagtcaaatgtgtttaaaaacctcactgccactctaattgtcaatgtgaaaccccagatttacgaaaaggccgtgtcatcgtttccagacccggctctctacccactgggcagcagacaaatcctgacttgtaccgcatatggtatccctcaacctacaatcaagtggttctggcacccctgtaaccataatcattccgaagcaaggtgtgacttttgttccaataatgaagagtcctttatcctggatgctgacagcaacatgggaaacagaattgagagcatcactcagcgcatggcaataatagaaggaaagaataagatggctagcaccttggttgtggctgactctagaatttctggaatctacatttgcatagcttccaataaagttgggactgtgggaagaaacataagcttttatatcacagatgtgccaaatgggtttcatgttaacttggaaaaaatgccgacggaaggagaggacctgaaactgtcttgcacagttaacaagttcttatacagagacgttacttggattttactgcggacagttaataacagaacaatgcactacagtattagcaagcaaaaaatggccatcactaaggagcactccatcactcttaatcttaccatcatgaatgtttccctgcaagattcaggcacctatgcctgcagagccaggaatgtatacacaggggaagaaatcctccagaagaaagaaattacaatcagagatcaggaagcaccatacctcctgcgaaacctcagtgatcacacagtggccatcagcagttccaccactttagactgtcatgctaatggtgtccccgagcctcagatcacttggtttaaaaacaaccacaaaatacaacaagagcctggaattattttaggaccaggaagcagcacgctgtttattgaaagagtcacagaagaggatgaaggtgtctatcactgcaaagccaccaaccagaagggctctgtggaaagttcagcatacctcactgttcaaggaacctcggacaagtctaatctggagctgatcactctaacatgcacctgtgtggctgcgactctcttctggctcctattaaccctccttatccgaaaaatgaaaaggtcttcttctgaaataaagactgactacctatcaattataatggacccagatgaagttcctttggatgagcagtgtgagcggctcccttatgatgccagcaagtgggagtttgcccgggagagacttaaactgggcaaatcacttggaagaggggcttttggaaaagtggttcaagcatcagcatttggcattaagaaatcacctacgtgccggactgtggctgtgaaaatgctgaaagagggggccacggccagcgagtacaaagctctgatgactgagctaaaaatcttgacccacattggccaccatctgaacgtggttaacctgctgggagcctgcaccaagcaaggagggcctctgatggtgattgttgaatactgcaaatatggaaatctctccaactacctcaagagcaaacgtgacttattttttctcaacaaggatgcagcactacacatggagcctaagaaagaaaaaatggagccaggcctggaacaaggcaagaaaccaagactagatagcgtcaccagcagcgaaagctttgcgagctccggctttcaggaagataaaagtctgagtgatgttgaggaagaggaggattctgacggtttctacaaggagcccatcactatggaagatctgatttcttacagttttcaagtggccagaggcatggagttcctgtcttccagaaagtgcattcatcgggacctggcagcgagaaacattcttttatctgagaacaacgtggtgaagatttgtgattttggccttgcccgggatatttataagaaccccgattatgtgagaaaaggagatactcgacttcctctgaaatggatggctcccgaatctatctttgacaaaatctacagcaccaagagcgacgtgtggtcttacggagtattgctgtgggaaatcttctccttaggtgggtctccatacccaggagtacaaatggatgaggacttttgcagtcgcctgagggaaggcatgaggatgagagctcctgagtactctactcctgaaatctatcagatcatgctggactgctggcacagagacccaaaagaaaggccaagatttgcagaacttgtggaaaaactaggtgatttgcttcaagcaaatgtacaacaggatggtaaagactacatcccaatcaatgccatactgacaggaaatagtgggtttacatactcaactcctgccttctctgaggacttcttcaaggaaagtatttcagctccgaagtttaattcaggaagctctgatgatgtcagatatgtaaatgctttcaagttcatgagcctggaaagaatcaaaacctttgaagaacttttaccgaatgccacctccatgtttgatgactaccagggcgacagcagcactctgttggcctctcccatgctgaagcgcttcacctggactgacagcaaacccaaggcctcgctcaagattgacttgagagtaaccagtaaaagtaaggagtcggggctgtctgatgtcagcaggcccagtttctgccattccagctgtgggcacgtcagcgaaggcaagcgcaggttcacctacgaccacgctgagctggaaaggaaaatcgcgtgctgctccccgcccccagactacaactcggtggtcctgtactccaccccacccatctagagtttgacacgaagccttatttctagaagcacatgtgtatttatacccccaggaaactagcttttgccagtattatgcatatataagtttacacctttatctttccatgggagccagctgctttttgtgatttttttaatagtgctttttttttttgactaacaagaatgtaactccagatagagaaatagtgacaagtgaagaacactactgctaaatcctcatgttactcagtgttagagaaatccttcctaaacccaatgacttccctgctccaacccccgccacctcagggcacgcaggaccagtttgattgaggagctgcactgatcacccaatgcatcacgtaccccactgggccagccctgcagcccaaaacccagggcaacaagcccgttagccccaggggatcactggctggcctgagcaacatctcgggagtcctctagcaggcctaagacatgtgaggaggaaaaggaaaaaaagcaaaaagcaagggagaaaagagaaaccgggagaaggcatgagaaagaatttgagacgcaccatgtgggcacggagggggacggggctcagcaatgccatttcagtggcttcccagctctgacccttctacatttgagggcccagccaggagcagatggacagcgatgaggggacattttctggattctgggaggcaagaaaaggacaaatatcttttttggaactaaagcaaattttagacctttacctatggaagtggttctatgtccattctcattcgtggcatgttttgatttgtagcactgagggtggcactcaactctgagcccatacttttggctcctctagtaagatgcactgaaaacttagccagagttaggttgtctccaggccatgatggccttacactgaaaatgtcacattctattttgggtattaatatatagtccagacacttaactcaatttcttggtattattctgttttgcacagttagttgtgaaagaaagctgagaagaatgaaaatgcagtcctgaggagagttttctccatatcaaaacgagggctgatggaggaaaaaggtcaataaggtcaagggaagaccccgtctctataccaaccaaaccaattcaccaacacagttgggacccaaaacacaggaagtcagtcacgtttccttttcatttaatggggattccactatctcacactaatctgaaaggatgtggaagagcattagctggcgcatattaagcactttaagctccttgagtaaaaaggtggtatgtaatttatgcaaggtatttctccagttgggactcaggatattagttaatgagccatcactagaagaaaagcccattttcaactgctttgaaacttgcctggggtctgagcatgatgggaatagggagacagggtaggaaagggcgcctactcttcagggtctaaagatcaagtgggccttggatcgctaagctggctctgtttgatgctatttatgcaagttagggtctatgtattta

SEQ ID NO: 185 - protein, 1338 aa, Homo sapiens
MVSYWDTGVLLCALLSCLLLTGSSSGSKLKDPELSLKGTQHIMQAGQTLHLQCRGEAAHKWSLPEMVSKESERLSITKSACGRNGKQFCSTLTLNTAQANHTGFYSCKYLAVPTSKKKETESAIYIFISDTGRPFVEMYSEIPEIIHMTEGRELVIPCRVTSPNITVTLKKFPLDTLIPDGKRIIWDSRKGFIISNATYKEIGLLTCEATVNGHLYKTNYLTHRQTNTIIDVQISTPRPVKLLRGHTLVLNCTATTPLNTRVQMTWSYPDEKNKRASVRRRIDQSNSHANIFYSVLTIDKMQNKDKGLYTCRVRSGPSFKSVNTSVHIYDKAFITVKHRKQQVLETVAGKRSYRLSMKVKAFPSPEVVWLKDGLPATEKSARYLTRGYSLIIKDVTEEDAGNYTILLSIKQSNVFKNLTATLIVNVKPQIYEKAVSSFPDPALYPLGSRQILTCTAYGIPQPTIKWFWHPCNHNHSEARCDFCSNNEESFILDADSNMGNRIESITQRMAIIEGKNKMASTLVVADSRISGIYICIASNKVGTVGRNISFYITDVPNGFHVNLEKMPTEGEDLKLSCTVNKFLYRDVTWILLRTVNNRTMHYSISKQKMAITKEHSITLNLTIMNVSLQDSGTYACRARNVYTGEEILQKKEITIRDQEAPYLLRNLSDHTVAISSSTTLDCHANGVPEPQITWFKNNHKIQQEPGIILGPGSSTLFIERVTEEDEGVYHCKATNQKGSVESSAYLTVQGTSDKSNLELITLTCTCVAATLFWLLLTLLIRKMKRSSSEIKTDYLSIIMDPDEVPLDEQCERLPYDASKWEFARERLKLGKSLGRGAFGKVVQASAFGIKKSPTCRTVAVKMLKEGATASEYKALMTELKILTHIGHHLNVVNLLGACTKQGGPLMVIVEYCKYGNLSNYLKSKRDLFFLNKDAALHMEPKKEKMEPGLEQGKKPRLDSVTSSESFASSGFQEDKSLSDVEEEEDSDGFYKEPITMEDLISYSFQVARGMEFLSSRKCIHRDLAARNILLSENNVVKICDFGLARDIYKNPDYVRKGDTRLPLKWMAPESIFDKIYSTKSDVWSYGVLLWEIFSLGGSPYPGVQMDEDFCSRLREGMRMRAPEYSTPEIYQIMLDCWHRDPKERPRFAELVEKLGDLLQANVQQDGKDYIPINAILTGNSGFTYSTPAFSEDFFKESISAPKFNSGSSDDVRYVNAFKFMSLERIKTFEELLPNATSMFDDYQGDSSTLLASPMLKRFTWTDSKPKASLKIDLRVTSKSKESGLSDVSRPSFCHSSCGHVSEGKRRFTYDHAELERKIACCSPPPDYNSVVLYSTPPI

SEQ ID NO: 186 - DNA, 5830 bp, Homo sapiens
actgagtcccgggaccccgggagagcggtcagtgtgtggtcgctgcgtttcctctgcctgcgccgggcatcacttgcgcgccgcagaaagtccgtctggcagcctggatatcctctcctaccggcacccgcagacgcccctgcagccgccggtcggcgcccgggctccctagccctgtgcgctcaactgtcctgcgctgcggggtgccgcgagttccacctccgcgcctccttctctagacaggcgctgggagaaagaaccggctcccgagttctgggcatttcgcccggctcgaggtgcaggatgcagagcaaggtgctgctggccgtcgccctgtggctctgcgtggagacccgggccgcctctgtgggtttgcctagtgtttctcttgatctgcccaggctcagcatacaaaaagacatacttacaattaaggctaatacaactcttcaaattacttgcaggggacagagggacttggactggctttggcccaataatcagagtggcagtgagcaaagggtggaggtgactgagtgcagcgatggcctcttctgtaagacactcacaattccaaaagtgatcggaaatgacactggagcctacaagtgcttctaccgggaaactgacttggcctcggtcatttatgtctatgttcaagattacagatctccatttattgcttctgttagtgaccaacatggagtcgtgtacattactgagaacaaaaacaaaactgtggtgattccatgtctcgggtccatttcaaatctcaacgtgtcactttgtgcaagatacccagaaaagagatttgttcctgatggtaacagaatttcctgggacagcaagaagggctttactattcccagctacatgatcagctatgctggcatggtcttctgtgaagcaaaaattaatgatgaaagttaccagtctattatgtacatagttgtcgttgtagggtataggatttatgatgtggttctgagtccgtctcatggaattgaactatctgttggagaaaagcttgtcttaaattgtacagcaagaactgaactaaatgtggggattgacttcaactgggaatacccttcttcgaagcatcagcataagaaacttgtaaaccgagacctaaaaacccagtctgggagtgagatgaagaaatttttgagcaccttaactatagatggtgtaacccggagtgaccaaggattgtacacctgtgcagcatccagtgggctgatgaccaagaagaacagcacatttgtcagggtccatgaaaaaccttttgttgcttttggaagtggcatggaatctctggtggaagccacggtgggggagcgtgtcagaatccctgcgaagtaccttggttacccacccccagaaataaaatggtataaaaatggaataccccttgagtccaatcacacaattaaagcggggcatgtactgacgattatggaagtgagtgaaagagacacaggaaattacactgtcatccttaccaatcccatttcaaaggagaagcagagccatgtggtctctctggttgtgtatgtcccaccccagattggtgagaaatctctaatctctcctgtggattcctaccagtacggcaccactcaaacgctgacatgtacggtctatgccattcctcccccgcatcacatccactggtattggcagttggaggaagagtgcgccaacgagcccagccaagctgtctcagtgacaaacccatacccttgtgaagaatggagaagtgtggaggacttccagggaggaaataaaattgaagttaataaaaatcaatttgctctaattgaaggaaaaaacaaaactgtaagtacccttgttatccaagcggcaaatgtgtcagctttgtacaaatgtgaagcggtcaacaaagtcgggagaggagagagggtgatctccttccacgtgaccaggggtcctgaaattactttgcaacctgacatgcagcccactgagcaggagagcgtgtctttgtggtgcactgcagacagatctacgtttgagaacctcacatggtacaagcttggcccacagcctctgccaatccatgtgggagagttgcccacacctgtttgcaagaacttggatactctttggaaattgaatgccaccatgttctctaatagcacaaatgacattttgatcatggagcttaagaatgcatccttgcaggaccaaggagactatgtctgccttgctcaagacaggaagaccaagaaaagacattgcgtggtcaggcagctcacagtcctagagcgtgtggcacccacgatcacaggaaacctggagaatcagacgacaagtattggggaaagcatcgaagtctcatgcacggcatctgggaatccccctccacagatcatgtggtttaaagataatgagacccttgtagaagactcaggcattgtattgaaggatgggaaccggaacctcactatccgcagagtgaggaaggaggacgaaggcctctacacctgccaggcatgcagtgttcttggctgtgcaaaagtggaggcatttttcataatagaaggtgcccaggaaaagacgaacttggaaatcattattctagtaggcacggcggtgattgccatgttcttctggctacttcttgtcatcatcctacggaccgttaagcgggccaatggaggggaactgaagacaggctacttgtccatcgtcatggatccagatgaactcccattggatgaacattgtgaacgactgccttatgatgccagcaaatgggaattccccagagaccggctgaagctaggtaagcctcttggccgtggtgcctttggccaagtgattgaagcagatgcctttggaattgacaagacagcaacttgcaggacagtagcagtcaaaatgttgaaagaaggagcaacacacagtgagcatcgagctctcatgtctgaactcaagatcctcattcatattggtcaccatctcaatgtggtcaaccttctaggtgcctgtaccaagccaggagggccactcatggtgattgtggaattctgcaaatttggaaacctgtccacttacctgaggagcaagagaaatgaatttgtcccctacaagaccaaaggggcacgattccgtcaagggaaagactacgttggagcaatccctgtggatctgaaacggcgcttggacagcatcaccagtagccagagctcagccagctctggatttgtggaggagaagtccctcagtgatgtagaagaagaggaagctcctgaagatctgtataaggacttcctgaccttggagcatctcatctgttacagcttccaagtggctaagggcatggagttcttggcatcgcgaaagtgtatccacagggacctggcggcacgaaatatcctcttatcggagaagaacgtggttaaaatctgtgactttggcttggcccgggatatttataaagatccagattatgtcagaaaaggagatgctcgcctccctttgaaatggatggccccagaaacaatttttgacagagtgtacacaatccagagtgacgtctggtcttttggtgttttgctgtgggaaatattttccttaggtgcttctccatatcctggggtaaagattgatgaagaattttgtaggcgattgaaagaaggaactagaatgagggcccctgattatactacaccagaaatgtaccagaccatgctggactgctggcacggggagcccagtcagagacccacgttttcagagttggtggaacatttgggaaatctcttgcaagctaatgctcagcaggatggcaaagactacattgttcttccgatatcagagactttgagcatggaagaggattctggactctctctgcctacctcacctgtttcctgtatggaggaggaggaagtatgtgaccccaaattccattatgacaacacagcaggaatcagtcagtatctgcagaacagtaagcgaaagagccggcctgtgagtgtaaaaacatttgaagatatcccgttagaagaaccagaagtaaaagtaatcccagatgacaaccagacggacagtggtatggttcttgcctcagaagagctgaaaactttggaagacagaaccaaattatctccatcttttggtggaatggtgcccagcaaaagcagggagtctgtggcatctgaaggctcaaaccagacaagcggctaccagtccggatatcactccgatgacacagacaccaccgtgtactccagtgaggaagcagaacttttaaagctgatagagattggagtgcaaaccggtagcacagcccagattctccagcctgactcggggaccacactgagctctcctcctgtttaaaaggaagcatccacaccccaactcccggacatcacatgagaggtctgctcagattttgaagtgttgttctttccaccagcaggaagtagccgcatttgattttcatttcgacaacagaaaaaggacctcggactgcagggagccagtcttctaggcatatcctggaagaggcttgtgacccaagaatgtgtctgtgtcttctcccagtgttgacctgatcctcttttttcattcatttaaaaagcattatcatgcccctgctgcgggtctcaccatgggtttagaacaaagagcttcaagcaatggccccatcctcaaagaagtagcagtacctggggagctgacacttctgtaaaactagaagataaaccaggcaacgtaagtgttcgaggtgttgaagatgggaaggatttgcagggctgagtctatccaagaggctttgtttaggacgtgggtcccaagccaagccttaagtgtggaattcggattgatagaaaggaagactaacgttaccttgctttggagagtactggagcctgcaaatgcattgtgtttgctctggtggaggtgggcatggggtctgttctgaaatgtaaagggttcagacggggtttctggttttagaaggttgcgtgttcttcgagttgggctaaagtagagttcgttgtgctgtttctgactcctaatgagagttccttccagaccgttagctgtctccttgccaagccccaggaagaaaatgatgcagctctggctccttgtctcccaggctgatcctttattcagaataccacaaagaaaggacattcagctcaaggctccctgccgtgttgaagagttctgactgcacaaaccagcttctggtttcttctggaatgaataccctcatatctgtcctgatgtgatatgtctgagactgaatgcgggaggttcaatgtgaagctgtgtgtggtgtcaaagtttcaggaaggattttacccttttgttcttccccctgtccccaacccactctcaccccgcaacccatcagtattttagttatttggcctctactccagtaaacctgattgggtttgttcactctctgaatgattattagccagacttcaaaattattttatagcccaaattataacatctattgtattatttagacttttaacatatagagctatttctactgatttttgcccttgttctgtcctttttttcaaaaaagaaaatgtgttttttgtttggtaccatagtgtgaaatgctgggaacaatgactataagacatgctatggcacatatatttatagtctgtttatgtagaaacaaatgtaatatattaaagccttatatataatgaactttgtactattcacattttgtatcagtattatgtagcataacaaaggtcataatgctttcagcaattgatgtcattttattaaagaacattgaaaaacttga

SEQ ID NO: 187 - protein, 1356 aa, Homo sapiens
MQSKVLLAVALWLCVETRAASVGLPSVSLDLPRLSIQKDILTIKANTTLQITCRGQRDLDWLWPNNQSGSEQRVEVTECSDGLFCKTLTIPKVIGNDTGAYKCFYRETDLASVIYVYVQDYRSPFIASVSDQHGVVYITENKNKTVVIPCLGSISNLNVSLCARYPEKRFVPDGNRISWDSKKGFTIPSYMISYAGMVFCEAKINDESYQSIMYIVVVVGYRIYDVVLSPSHGIELSVGEKLVLNCTARTELNVGIDFNWEYPSSKHQHKKLVNRDLKTQSGSEMKKFLSTLTIDGVTRSDQGLYTCAASSGLMTKKNSTFVRVHEKPFVAFGSGMESLVEATVGERVRIPAKYLGYPPPEIKWYKNGIPLESNHTIKAGHVLTIMEVSERDTGNYTVILTNPISKEKQSHVVSLVVYVPPQIGEKSLISPVDSYQYGTTQTLTCTVYAIPPPHHIHWYWQLEEECANEPSQAVSVTNPYPCEEWRSVEDFQGGNKIEVNKNQFALIEGKNKTVSTLVIQAANVSALYKCEAVNKVGRGERVISFHVTRGPEITLQPDMQPTEQESVSLWCTADRSTFENLTWYKLGPQPLPIHVGELPTPVCKNLDTLWKLNATMFSNSTNDILIMELKNASLQDQGDYVCLAQDRKTKKRHCVVRQLTVLERVAPTITGNLENQTTSIGESIEVSCTASGNPPPQIMWFKDNETLVEDSGIVLKDGNRNLTIRRVRKEDEGLYTCQACSVLGCAKVEAFFIIEGAQEKTNLEIIILVGTAVIAMFFWLLLVIILRTVKRANGGELKTGYLSIVMDPDELPLDEHCERLPYDASKWEFPRDRLKLGKPLGRGAFGQVIEADAFGIDKTATCRTVAVKMLKEGATHSEHRALMSELKILIHIGHHLNVVNLLGACTKPGGPLMVIVEFCKFGNLSTYLRSKRNEFVPYKTKGARFRQGKDYVGAIPVDLKRRLDSITSSQSSASSGFVEEKSLSDVEEEEAPEDLYKDFLTLEHLICYSFQVAKGMEFLASRKCIHRDLAARNILLSEKNVVKICDFGLARDIYKDPDYVRKGDARLPLKWMAPETIFDRVYTIQSDVWSFGVLLWEIFSLGASPYPGVKIDEEFCRRLKEGTRMRAPDYTTPEMYQTMLDCWHGEPSQRPTFSELVEHLGNLLQANAQQDGKDYIVLPISETLSMEEDSGLSLPTSPVSCMEEEEVCDPKFHYDNTAGISQYLQNSKRKSRPVSVKTFEDIPLEEPEVKVIPDDNQTDSGMVLASEELKTLEDRTKLSPSFGGMVPSKSRESVASEGSNQTSGYQSGYHSDDTDTTVYSSEEAELLKLIEIGVQTGSTAQILQPDSGTTLSSPPV

SEQ ID NO: 188 - DNA, 4138 bp, Homo sapiens
cttctgtgctgttccttcttgcctctaacttgtaaacaagacgtactaggacgatgctaatggaaagtcacaaaccgctgggtttttgaaaggatccttgggacctcatgcacatttgtggaaactggatggagagatttggggaagcatggactctttagccagcttagttctctgtggagtcagcttgctcctttctggaactgtggaaggtgccatggacttgatcttgatcaattccctacctcttgtatctgatgctgaaacatctctcacctgcattgcctctgggtggcgcccccatgagcccatcaccataggaagggactttgaagccttaatgaaccagcaccaggatccgctggaagttactcaagatgtgaccagagaatgggctaaaaaagttgtttggaagagagaaaaggctagtaagatcaatggtgcttatttctgtgaagggcgagttcgaggagaggcaatcaggatacgaaccatgaagatgcgtcaacaagcttccttcctaccagctactttaactatgactgtggacaagggagataacgtgaacatatctttcaaaaaggtattgattaaagaagaagatgcagtgatttacaaaaatggttccttcatccattcagtgccccggcatgaagtacctgatattctagaagtacacctgcctcatgctcagccccaggatgctggagtgtactcggccaggtatataggaggaaacctcttcacctcggccttcaccaggctgatagtccggagatgtgaagcccagaagtggggacctgaatgcaaccatctctgtactgcttgtatgaacaatggtgtctgccatgaagatactggagaatgcatttgccctcctgggtttatgggaaggacgtgtgagaaggcttgtgaactgcacacgtttggcagaacttgtaaagaaaggtgcagtggacaagagggatgcaagtcttatgtgttctgtctccctgacccctatgggtgttcctgtgccacaggctggaagggtctgcagtgcaatgaagcatgccaccctggtttttacgggccagattgtaagcttaggtgcagctgcaacaatggggagatgtgtgatcgcttccaaggatgtctctgctctccaggatggcaggggctccagtgtgagagagaaggcataccgaggatgaccccaaagatagtggatttgccagatcatatagaagtaaacagtggtaaatttaatcccatttgcaaagcttctggctggccgctacctactaatgaagaaatgaccctggtgaagccggatgggacagtgctccatccaaaagactttaaccatacggatcatttctcagtagccatattcaccatccaccggatcctcccccctgactcaggagtttgggtctgcagtgtgaacacagtggctgggatggtggaaaagcccttcaacatttctgttaaagttcttccaaagcccctgaatgccccaaacgtgattgacactggacataactttgctgtcatcaacatcagctctgagccttactttggggatggaccaatcaaatccaagaagcttctatacaaacccgttaatcactatgaggcttggcaacatattcaagtgacaaatgagattgttacactcaactatttggaacctcggacagaatatgaactctgtgtgcaactggtccgtcgtggagagggtggggaagggcatcctggacctgtgagacgcttcacaacagcttctatcggactccctcctccaagaggtctaaatctcctgcctaaaagtcagaccactctaaatttgacctggcaaccaatatttccaagctcggaagatgacttttatgttgaagtggagagaaggtctgtgcaaaaaagtgatcagcagaatattaaagttccaggcaacttgacttcggtgctacttaacaacttacatcccagggagcagtacgtggtccgagctagagtcaacaccaaggcccagggggaatggagtgaagatctcactgcttggacccttagtgacattcttcctcctcaaccagaaaacatcaagatttccaacattacacactcctcggctgtgatttcttggacaatattggatggctattctatttcttctattactatccgttacaaggttcaaggcaagaatgaagaccagcacgttgatgtgaagataaagaatgccaccatcattcagtatcagctcaagggcctagagcctgaaacagcataccaggtggacatttttgcagagaacaacatagggtcaagcaacccagccttttctcatgaactggtgaccctcccagaatctcaagcaccagcggacctcggaggggggaagatgctgcttatagccatccttggctctgctggaatgacctgcctgactgtgctgttggcctttctgatcatattgcaattgaagagggcaaatgtgcaaaggagaatggcccaagccttccaaaacgtgagggaagaaccagctgtgcagttcaactcagggactctggccctaaacaggaaggtcaaaaacaacccagatcctacaatttatccagtgcttgactggaatgacatcaaatttcaagatgtgattggggagggcaattttggccaagttcttaaggcgcgcatcaagaaggatgggttacggatggatgctgccatcaaaagaatgaaagaatatgcctccaaagatgatcacagggactttgcaggagaactggaagttctttgtaaacttggacaccatccaaacatcatcaatctcttaggagcatgtgaacatcgaggctacttgtacctggccattgagtacgcgccccatggaaaccttctggacttccttcgcaagagccgtgtgctggagacggacccagcatttgccattgccaatagcaccgcgtccacactgtcctcccagcagctccttcacttcgctgccgacgtggcccggggcatggactacttgagccaaaaacagtttatccacagggatctggctgccagaaacattttagttggtgaaaactatgtggcaaaaatagcagattttggattgtcccgaggtcaagaggtgtacgtgaaaaagacaatgggaaggctcccagtgcgctggatggccatcgagtcactgaattacagtgtgtacacaaccaacagtgatgtatggtcctatggtgtgttactatgggagattgttagcttaggaggcacaccctactgcgggatgacttgtgcagaactctacgagaagctgccccagggctacagactggagaagcccctgaactgtgatgatgaggtgtatgatctaatgagacaatgctggcgggagaagccttatgagaggccatcatttgcccagatattggtgtccttaaacagaatgttagaggagcgaaagacctacgtgaataccacgctttatgagaagtttacttatgcaggaattgactgttctgctgaagaagcggcctaggacagaacatctgtataccctctgtttccctttcactggcatgggagacccttgacaactgctgagaaaacatgcctctgccaaaggatgtgatatataagtgtacatatgtgctggaattctaacaagtcataggttaatatttaagacactgaaaaatctaagtgatataaatcagattcttctctctcattttatccctcacctgtagcatgccagtcccgtttcatttagtcatgtgaccactctgtcttgtgtttccacagcctgcaagttcagtccaggatgctaacatctaaaaatagacttaaatctcattgcttacaagcctaagaatctttagagaagtatacataagtttaggataaaataatgggattttcttttcttttctctggtaatattgacttgtatattttaagaaataacagaaagcctgggtgacatttgggagacatgtgacatttatatattgaattaatatccctacatgtattgcacattgtaaaaagttttagttttgatgagttgtgagtttaccttgtatactgtaggcacactttgcactgatatatcatgagtgaataaatgtcttgcctactcaaaaaaaaaaaa

SEQ ID NO: 189 - protein, 1124 aa, Homo sapiens
MDSLASLVLCGVSLLLSGTVEGAMDLILINSLPLVSDAETSLTCIASGWRPHEPITIGRDFEALMNQHQDPLEVTQDVTREWAKKVVWKREKASKINGAYFCEGRVRGEAIRIRTMKMRQQASFLPATLTMTVDKGDNVNISFKKVLIKEEDAVIYKNGSFIHSVPRHEVPDILEVHLPHAQPQDAGVYSARYIGGNLFTSAFTRLIVRRCEAQKWGPECNHLCTACMNNGVCHEDTGECICPPGFMGRTCEKACELHTFGRTCKERCSGQEGCKSYVFCLPDPYGCSCATGWKGLQCNEACHPGFYGPDCKLRCSCNNGEMCDRFQGCLCSPGWQGLQCEREGIPRMTPKIVDLPDHIEVNSGKFNPICKASGWPLPTNEEMTLVKPDGTVLHPKDFNHTDHFSVAIFTIHRILPPDSGVWVCSVNTVAGMVEKPFNISVKVLPKPLNAPNVIDTGHNFAVINISSEPYFGDGPIKSKKLLYKPVNHYEAWQHIQVTNEIVTLNYLEPRTEYELCVQLVRRGEGGEGHPGPVRRFTTASIGLPPPRGLNLLPKSQTTLNLTWQPIFPSSEDDFYVEVERRSVQKSDQQNIKVPGNLTSVLLNNLHPREQYVVRARVNTKAQGEWSEDLTAWTLSDILPPQPENIKISNITHSSAVISWTILDGYSISSITIRYKVQGKNEDQHVDVKIKNATIIQYQLKGLEPETAYQVDIFAENNIGSSNPAFSHELVTLPESQAPADLGGGKMLLIAILGSAGMTCLTVLLAFLIILQLKRANVQRRMAQAFQNVREEPAVQFNSGTLALNRKVKNNPDPTIYPVLDWNDIKFQDVIGEGNFGQVLKARIKKDGLRMDAAIKRMKEYASKDDHRDFAGELEVLCKLGHHPNIINLLGACEHRGYLYLAIEYAPHGNLLDFLRKSRVLETDPAFAIANSTASTLSSQQLLHFAADVARGMDYLSQKQFIHRDLAARNILVGENYVAKIADFGLSRGQEVYVKKTMGRLPVRWMAIESLNYSVYTTNSDVWSYGVLLWEIVSLGGTPYCGMTCAELYEKLPQGYRLEKPLNCDDEVYDLMRQCWREKPYERPSFAQILVSLNRMLEERKTYVNTTLYEKFTYAGIDCSAEEAA

SEQ ID NO: 190 - DNA, 8449 bp, Homo sapiens
gcccgcgccggctgtgctgcacagggggaggagagggaaccccaggcgcgagcgggaagaggggacctgcagccacaacttctctggtcctctgcatcccttctgtccctccacccgtccccttccccaccctctggcccccaccttcttggaggcgacaacccccgggaggcattagaagggatttttcccgcaggttgcgaagggaagcaaacttggtggcaacttgcctcccggtgcgggcgtctctcccccaccgtctcaacatgcttaggggtccggggcccgggctgctgctgctggccgtccagtgcctggggacagcggtgccctccacgggagcctcgaagagcaagaggcaggctcagcaaatggttcagccccagtccccggtggctgtcagtcaaagcaagcccggttgttatgacaatggaaaacactatcagataaatcaacagtgggagcggacctacctaggcaatgcgttggtttgtacttgttatggaggaagccgaggttttaactgcgagagtaaacctgaagctgaagagacttgctttgacaagtacactgggaacacttaccgagtgggtgacacttatgagcgtcctaaagactccatgatctgggactgtacctgcatcggggctgggcgagggagaataagctgtaccatcgcaaaccgctgccatgaagggggtcagtcctacaagattggtgacacctggaggagaccacatgagactggtggttacatgttagagtgtgtgtgtcttggtaatggaaaaggagaatggacctgcaagcccatagctgagaagtgttttgatcatgctgctgggacttcctatgtggtcggagaaacgtgggagaagccctaccaaggctggatgatggtagattgtacttgcctgggagaaggcagcggacgcatcacttgcacttctagaaatagatgcaacgatcaggacacaaggacatcctatagaattggagacacctggagcaagaaggataatcgaggaaacctgctccagtgcatctgcacaggcaacggccgaggagagtggaagtgtgagaggcacacctctgtgcagaccacatcgagcggatctggccccttcaccgatgttcgtgcagctgtttaccaaccgcagcctcacccccagcctcctccctatggccactgtgtcacagacagtggtgtggtctactctgtggggatgcagtggctgaagacacaaggaaataagcaaatgctttgcacgtgcctgggcaacggagtcagctgccaagagacagctgtaacccagacttacggtggcaactcaaatggagagccatgtgtcttaccattcacctacaatggcaggacgttctactcctgcaccacagaagggcgacaggacggacatctttggtgcagcacaacttcgaattatgagcaggaccagaaatactctttctgcacagaccacactgttttggttcagactcgaggaggaaattccaatggtgccttgtgccacttccccttcctatacaacaaccacaattacactgattgcacttctgagggcagaagagacaacatgaagtggtgtgggaccacacagaactatgatgccgaccagaagtttgggttctgccccatggctgcccacgaggaaatctgcacaaccaatgaaggggtcatgtaccgcattggagatcagtgggataagcagcatgacatgggtcacatgatgaggtgcacgtgtgttgggaatggtcgtggggaatggacatgcattgcctactcgcagcttcgagatcagtgcattgttgatgacatcacttacaatgtgaacgacacattccacaagcgtcatgaagaggggcacatgctgaactgtacatgcttcggtcagggtcggggcaggtggaagtgtgatcccgtcgaccaatgccaggattcagagactgggacgttttatcaaattggagattcatgggagaagtatgtgcatggtgtcagataccagtgctactgctatggccgtggcattggggagtggcattgccaacctttacagacctatccaagctcaagtggtcctgtcgaagtatttatcactgagactccgagtcagcccaactcccaccccatccagtggaatgcaccacagccatctcacatttccaagtacattctcaggtggagacctaaaaattctgtaggccgttggaaggaagctaccataccaggccacttaaactcctacaccatcaaaggcctgaagcctggtgtggtatacgagggccagctcatcagcatccagcagtacggccaccaagaagtgactcgctttgacttcaccaccaccagcaccagcacacctgtgaccagcaacaccgtgacaggagagacgactcccttttctcctcttgtggccacttctgaatctgtgaccgaaatcacagccagtagctttgtggtctcctgggtctcagcttccgacaccgtgtcgggattccgggtggaatatgagctgagtgaggagggagatgagccacagtacctggatcttccaagcacagccacttctgtgaacatccctgacctgcttcctggccgaaaatacattgtaaatgtctatcagatatctgaggatggggagcagagtttgatcctgtctacttcacaaacaacagcgcctgatgcccctcctgacccgactgtggaccaagttgatgacacctcaattgttgttcgctggagcagaccccaggctcccatcacagggtacagaatagtctattcgccatcagtagaaggtagcagcacagaactcaaccttcctgaaactgcaaactccgtcaccctcagtgacttgcaacctggtgttcagtataacatcactatctatgctgtggaagaaaatcaagaaagtacacctgttgtcattcaacaagaaaccactggcaccccacgctcagatacagtgccctctcccagggacctgcagtttgtggaagtgacagacgtgaaggtcaccatcatgtggacaccgcctgagagtgcagtgaccggctaccgtgtggatgtgatccccgtcaacctgcctggcgagcacgggcagaggctgcccatcagcaggaacacctttgcagaagtcaccgggctgtcccctggggtcacctattacttcaaagtctttgcagtgagccatgggagggagagcaagcctctgactgctcaacagacaaccaaactggatgctcccactaacctccagtttgtcaatgaaactgattctactgtcctggtgagatggactccacctcgggcccagataacaggataccgactgaccgtgggccttacccgaagaggacagcccaggcagtacaatgtgggtccctctgtctccaagtacccactgaggaatctgcagcctgcatctgagtacaccgtatccctcgtggccataaagggcaaccaagagagccccaaagccactggagtctttaccacactgcagcctgggagctctattccaccttacaacaccgaggtgactgagaccaccattgtgatcacatggacgcctgctccaagaattggttttaagctgggtgtacgaccaagccagggaggagaggcaccacgagaagtgacttcagactcaggaagcatcgttgtgtccggcttgactccaggagtagaatacgtctacaccatccaagtcctgagagatggacaggaaagagatgcgccaattgtaaacaaagtggtgacaccattgtctccaccaacaaacttgcatctggaggcaaaccctgacactggagtgctcacagtctcctgggagaggagcaccaccccagacattactggttatagaattaccacaacccctacaaacggccagcagggaaattctttggaagaagtggtccatgctgatcagagctcctgcacttttgataacctgagtcccggcctggagtacaatgtcagtgtttacactgtcaaggatgacaaggaaagtgtccctatctctgataccatcatcccagctgttcctcctcccactgacctgcgattcaccaacattggtccagacaccatgcgtgtcacctgggctccacccccatccattgatttaaccaacttcctggtgcgttactcacctgtgaaaaatgaggaagatgttgcagagttgtcaatttctccttcagacaatgcagtggtcttaacaaatctcctgcctggtacagaatatgtagtgagtgtctccagtgtctacgaacaacatgagagcacacctcttagaggaagacagaaaacaggtcttgattccccaactggcattgacttttctgatattactgccaactcttttactgtgcactggattgctcctcgagccaccatcactggctacaggatccgccatcatcccgagcacttcagtgggagacctcgagaagatcgggtgccccactctcggaattccatcaccctcaccaacctcactccaggcacagagtatgtggtcagcatcgttgctcttaatggcagagaggaaagtcccttattgattggccaacaatcaacagtttctgatgttccgagggacctggaagttgttgctgcgacccccaccagcctactgatcagctgggatgctcctgctgtcacagtgagatattacaggatcacttacggagagacaggaggaaatagccctgtccaggagttcactgtgcctgggagcaagtctacagctaccatcagcggccttaaacctggagttgattataccatcactgtgtatgctgtcactggccgtggagacagccccgcaagcagcaagccaatttccattaattaccgaacagaaattgacaaaccatcccagatgcaagtgaccgatgttcaggacaacagcattagtgtcaagtggctgccttcaagttcccctgttactggttacagagtaaccaccactcccaaaaatggaccaggaccaacaaaaactaaaactgcaggtccagatcaaacagaaatgactattgaaggcttgcagcccacagtggagtatgtggttagtgtctatgctcagaatccaagcggagagagtcagcctctggttcagactgcagtaaccaacattgatcgccctaaaggactggcattcactgatgtggatgtcgattccatcaaaattgcttgggaaagcccacaggggcaagtttccaggtacagggtgacctactcgagccctgaggatggaatccatgagctattccctgcacctgatggtgaagaagacactgcagagctgcaaggcctcagaccgggttctgagtacacagtcagtgtggttgccttgcacgatgatatggagagccagcccctgattggaacccagtccacagctattcctgcaccaactgacctgaagttcactcaggtcacacccacaagcctgagcgcccagtggacaccacccaatgttcagctcactggatatcgagtgcgggtgacccccaaggagaagaccggaccaatgaaagaaatcaaccttgctcctgacagctcatccgtggttgtatcaggacttatggtggccaccaaatatgaagtgagtgtctatgctcttaaggacactttgacaagcagaccagctcagggagttgtcaccactctggagaatgtcagcccaccaagaagggctcgtgtgacagatgctactgagaccaccatcaccattagctggagaaccaagactgagacgatcactggcttccaagttgatgccgttccagccaatggccagactccaatccagagaaccatcaagccagatgtcagaagctacaccatcacaggtttacaaccaggcactgactacaagatctacctgtacaccttgaatgacaatgctcggagctcccctgtggtcatcgacgcctccactgccattgatgcaccatccaacctgcgtttcctggccaccacacccaattccttgctggtatcatggcagccgccacgtgccaggattaccggctacatcatcaagtatgagaagcctgggtctcctcccagagaagtggtccctcggccccgccctggtgtcacagaggctactattactggcctggaaccgggaaccgaatatacaatttatgtcattgccctgaagaataatcagaagagcgagcccctgattggaaggaaaaagacagacgagcttccccaactggtaacccttccacaccccaatcttcatggaccagagatcttggatgttccttccacagttcaaaagacccctttcgtcacccaccctgggtatgacactggaaatggtattcagcttcctggcacttctggtcagcaacccagtgttgggcaacaaatgatctttgaggaacatggttttaggcggaccacaccgcccacaacggccacccccataaggcataggccaagaccatacccgccgaatgtaggacaagaagctctctctcagacaaccatctcatgggccccattccaggacacttctgagtacatcatttcatgtcatcctgttggcactgatgaagaacccttacagttcagggttcctggaacttctaccagtgccactctgacaggcctcaccagaggtgccacctacaacatcatagtggaggcactgaaagaccagcagaggcataaggttcgggaagaggttgttaccgtgggcaactctgtcaacgaaggcttgaaccaacctacggatgactcgtgctttgacccctacacagtttcccattatgccgttggagatgagtgggaacgaatgtctgaatcaggctttaaactgttgtgccagtgcttaggctttggaagtggtcatttcagatgtgattcatctagatggtgccatgacaatggtgtgaactacaagattggagagaagtgggaccgtcagggagaaaatggccagatgatgagctgcacatgtcttgggaacggaaaaggagaattcaagtgtgaccctcatgaggcaacgtgttatgatgatgggaagacataccacgtaggagaacagtggcagaaggaatatctcggtgccatttgctcctgcacatgctttggaggccagcggggctggcgctgtgacaactgccgcagacctgggggtgaacccagtcccgaaggcactactggccagtcctacaaccagtattctcagagataccatcagagaacaaacactaatgttaattgcccaattgagtgcttcatgcctttagatgtacaggctgacagagaagattcccgagagtaaatcatctttccaatccagaggaacaagcatgtctctctgccaagatccatctaaactggagtgatgttagcagacccagcttagagttcttctttctttcttaagccctttgctctggaggaagttctccagcttcagctcaactcacagcttctccaagcatcaccctgggagtttcctgagggttttctcataaatgagggctgcacattgcctgttctgcttcgaagtattcaataccgctcagtattttaaatgaagtgattctaagatttggtttgggatcaataggaaagcatatgcagccaaccaagatgcaaatgttttgaaatgatatgaccaaaattttaagtaggaaagtcacccaaacacttctgctttcacttaagtgtctggcccgcaatactgtaggaacaagcatgatcttgttactgtgatattttaaatatccacagtactcactttttccaaatgatcctagtaattgcctagaaatatctttctcttacctgttatttatcaatttttcccagtatttttatacggaaaaaattgtattgaaaacacttagtatgcagttgataagaggaatttggtataattatggtgggtgattattttttatactgtatgtgccaaagctttactactgtggaaagacaactgttttaataaaagatttacattccacaacttgaagttcatctatttgatataagacaccttcgggggaaataattcctgtgaatattctttttcaattcagcaaacatttgaaaatctatgatgtgcaagtctaattgttgatttcagtacaagattttctaaatcagttgctacaaaaactgattggtttttgtcacttcatctcttcactaatggagatagctttacactttctgctttaatagatttaagtggaccccaatatttattaaaattgctagtttaccgttcagaagtataatagaaataatctttagttgctcttttctaaccattgtaattcttcccttcttccctccacctttccttcattgaataaacctctgttcaaagagattgcctgcaagggaaataaaaatgactaagatattaaaaaaaaaaaaaaaaaa

SEQ ID NO: 191 - protein, 2355 aa, Homo sapiens
MLRGPGPGLLLLAVQCLGTAVPSTGASKSKRQAQQMVQPQSPVAVSQSKPGCYDNGKHYQINQQWERTYLGNALVCTCYGGSRGFNCESKPEAEETCFDKYTGNTYRVGDTYERPKDSMIWDCTCIGAGRGRISCTIANRCHEGGQSYKIGDTWRRPHETGGYMLECVCLGNGKGEWTCKPIAEKCFDHAAGTSYVVGETWEKPYQGWMMVDCTCLGEGSGRITCTSRNRCNDQDTRTSYRIGDTWSKKDNRGNLLQCICTGNGRGEWKCERHTSVQTTSSGSGPFTDVRAAVYQPQPHPQPPPYGHCVTDSGVVYSVGMQWLKTQGNKQMLCTCLGNGVSCQETAVTQTYGGNSNGEPCVLPFTYNGRTFYSCTTEGRQDGHLWCSTTSNYEQDQKYSFCTDHTVLVQTRGGNSNGALCHFPFLYNNHNYTDCTSEGRRDNMKWCGTTQNYDADQKFGFCPMAAHEEICTTNEGVMYRIGDQWDKQHDMGHMMRCTCVGNGRGEWTCIAYSQLRDQCIVDDITYNVNDTFHKRHEEGHMLNCTCFGQGRGRWKCDPVDQCQDSETGTFYQIGDSWEKYVHGVRYQCYCYGRGIGEWHCQPLQTYPSSSGPVEVFITETPSQPNSHPIQWNAPQPSHISKYILRWRPKNSVGRWKEATIPGHLNSYTIKGLKPGVVYEGQLISIQQYGHQEVTRFDFTTTSTSTPVTSNTVTGETTPFSPLVATSESVTEITASSFVVSWVSASDTVSGFRVEYELSEEGDEPQYLDLPSTATSVNIPDLLPGRKYIVNVYQISEDGEQSLILSTSQTTAPDAPPDPTVDQVDDTSIVVRWSRPQAPITGYRIVYSPSVEGSSTELNLPETANSVTLSDLQPGVQYNITIYAVEENQESTPVVIQQETTGTPRSDTVPSPRDLQFVEVTDVKVTIMWTPPESAVTGYRVDVIPVNLPGEHGQRLPISRNTFAEVTGLSPGVTYYFKVFAVSHGRESKPLTAQQTTKLDAPTNLQFVNETDSTVLVRWTPPRAQITGYRLTVGLTRRGQPRQYNVGPSVSKYPLRNLQPASEYTVSLVAIKGNQESPKATGVFTTLQPGSSIPPYNTEVTETTIVITWTPAPRIGFKLGVRPSQGGEAPREVTSDSGSIVVSGLTPGVEYVYTIQVLRDGQERDAPIVNKVVTPLSPPTNLHLEANPDTGVLTVSWERSTTPDITGYRITTTPTNGQQGNSLEEVVHADQSSCTFDNLSPGLEYNVSVYTVKDDKESVPISDTIIPAVPPPTDLRFTNIGPDTMRVTWAPPPSIDLTNFLVRYSPVKNEEDVAELSISPSDNAVVLTNLLPGTEYVVSVSSVYEQHESTPLRGRQKTGLDSPTGIDFSDITANSFTVHWIAPRATITGYRIRHHPEHFSGRPREDRVPHSRNSITLTNLTPGTEYVVSIVALNGREESPLLIGQQSTVSDVPRDLEVVAATPTSLLISWDAPAVTVRYYRITYGETGGNSPVQEFTVPGSKSTATISGLKPGVDYTITVYAVTGRGDSPASSKPISINYRTEIDKPSQMQVTDVQDNSISVKWLPSSSPVTGYRVTTTPKNGPGPTKTKTAGPDQTEMTIEGLQPTVEYVVSVYAQNPSGESQPLVQTAVTNIDRPKGLAFTDVDVDSIKIAWESPQGQVSRYRVTYSSPEDGIHELFPAPDGEEDTAELQGLRPGSEYTVSVVALHDDMESQPLIGTQSTAIPAPTDLKFTQVTPTSLSAQWTPPNVQLTGYRVRVTPKEKTGPMKEINLAPDSSSVVVSGLMVATKYEVSVYALKDTLTSRPAQGVVTTLENVSPPRRARVTDATETTITISWRTKTETITGFQVDAVPANGQTPIQRTIKPDVRSYTITGLQPGTDYKIYLYTLNDNARSSPVVIDASTAIDAPSNLRFLATTPNSLLVSWQPPRARITGYIIKYEKPGSPPREVVPRPRPGVTEATITGLEPGTEYTIYVIALKNNQKSEPLIGRKKTDELPQLVTLPHPNLHGPEILDVPSTVQKTPFVTHPGYDTGNGIQLPGTSGQQPSVGQQMIFEEHGFRRTTPPTTATPIRHRPRPYPPNVGQEALSQTTISWAPFQDTSEYIISCHPVGTDEEPLQFRVPGTSTSATLTGLTRGATYNIIVEALKDQQRHKVREEVVTVGNSVNEGLNQPTDDSCFDPYTVSHYAVGDEWERMSESGFKLLCQCLGFGSGHFRCDSSRWCHDNGVNYKIGEKWDRQGENGQMMSCTCLGNGKGEFKCDPHEATCYDDGKTYHVGEQWQKEYLGAICSCTCFGGQRGWRCDNCRRPGGEPSPEGTTGQSYNQYSQRYHQRTNTNVNCPIECFMPLDVQADREDSRE

SEQ ID NO: 192 - DNA, 1851 bp, Homo sapiens
gggcgcgccagagacgcagccgcgctcccaccacccacacccaccgcgccctcgttcgcctcttctccgggagccagtccgcgccaccgccgccgcccaggccatcgccaccctccgcagccatgtccaccaggtccgtgtcctcgtcctcctaccgcaggatgttcggcggcccgggcaccgcgagccggccgagctccagccggagctacgtgactacgtccacccgcacctacagcctgggcagcgcgctgcgccccagcaccagccgcagcctctacgcctcgtccccgggcggcgtgtatgccacgcgctcctctgccgtgcgcctgcggagcagcgtgcccggggtgcggctcctgcaggactcggtggacttctcgctggccgacgccatcaacaccgagttcaagaacacccgcaccaacgagaaggtggagctgcaggagctgaatgaccgcttcgccaactacatcgacaaggtgcgcttcctggagcagcagaataagatcctgctggccgagctcgagcagctcaagggccaaggcaagtcgcgcctaggggacctctacgaggaggagatgcgggagctgcgccggcaggtggaccagctaaccaacgacaaagcccgcgtcgaggtggagcgcgacaacctggccgaggacatcatgcgcctccgggagaaattgcaggaggagatgcttcagagagaggaagccgaaaacaccctgcaatctttcagacaggatgttgacaatgcgtctctggcacgtcttgaccttgaacgcaaagtggaatctttgcaagaagagattgcctttttgaagaaactccacgaagaggaaatccaggagctgcaggctcagattcaggaacagcatgtccaaatcgatgtggatgtttccaagcctgacctcacggctgccctgcgtgacgtacgtcagcaatatgaaagtgtggctgccaagaacctgcaggaggcagaagaatggtacaaatccaagtttgctgacctctctgaggctgccaaccggaacaatgacgccctgcgccaggcaaagcaggagtccactgagtaccggagacaggtgcagtccctcacctgtgaagtggatgcccttaaaggaaccaatgagtccctggaacgccagatgcgtgaaatggaagagaactttgccgttgaagctgctaactaccaagacactattggccgcctgcaggatgagattcagaatatgaaggaggaaatggctcgtcaccttcgtgaataccaagacctgctcaatgttaagatggcccttgacattgagattgccacctacaggaagctgctggaaggcgaggagagcaggatttctctgcctcttccaaacttttcctccctgaacctgagggaaactaatctggattcactccctctggttgatacccactcaaaaaggacattcctgattaagacggttgaaactagagatggacaggttatcaacgaaacttctcagcatcacgatgaccttgaataaaaattgcacacactcagtggcaggcgatatattacccaggcaagaataaaaaagaaatcccatatcttaaagaaacagctttcaagtgcctttctgcagtttttcaggagcgcaagatagatttggaataggaataagctctagttcttaacaaccgacactcctacaagatttagaaaaaagtttacaacataatctagtttacagaaaaatcttgtgctagaatactttttaaaaggtattttgaataccattaaaactgcttttttttttccagcaagtatccaaccaacttggttctgcttcaataaatctttggaaaactcca

SEQ ID NO: 193 - protein, 466 aa, Homo sapiens
MSTRSVSSSSYRRMFGGPGTASRPSSSRSYVTTSTRTYSLGSALRPSTSRSLYASSPGGVYATRSSAVRLRSSVPGVRLLQDSVDFSLADAINTEFKNTRTNEKVELQELNDRFANYIDKVRFLEQQNKILLAELEQLKGQGKSRLGDLYEEEMRELRRQVDQLTNDKARVEVERDNLAEDIMRLREKLQEEMLQREEAENTLQSFRQDVDNASLARLDLERKVESLQEEIAFLKKLHEEEIQELQAQIQEQHVQIDVDVSKPDLTAALRDVRQQYESVAAKNLQEAEEWYKSKFADLSEAANRNNDALRQAKQESTEYRRQVQSLTCEVDALKGTNESLERQMREMEENFAVEAANYQDTIGRLQDEIQNMKEEMARHLREYQDLLNVKMALDIEIATYRKLLEGEESRISLPLPNFSSLNLRETNLDSLPLVDTHSKRTFLIKTVETRDGQVINETSQHHDDLE

SEQ ID NO: 194 - DNA, 1330 bp, Homo sapiens
gcagcccagccaagcactgtcaggaatcctgtgaagcagctccagctatgtgtgaagaagaggacagcactgccttggtgtgtgacaatggctctgggctctgtaaggccggctttgctggggacgatgctcccagggctgttttcccatccattgtgggacgtcccagacatcagggggtgatggtgggaatgggacaaaaagacagctacgtgggtgacgaagcacagagcaaaagaggaatcctgaccctgaagtacccgatagaacatggcatcatcaccaactgggacgacatggaaaagatctggcaccactctttctacaatgagcttcgtgttgcccctgaagagcatcccaccctgctcacggaggcacccctgaaccccaaggccaaccgggagaaaatgactcaaattatgtttgagactttcaatgtcccagccatgtatgtggctatccaggcggtgctgtctctctatgcctctggacgcacaactggcatcgtgctggactctggagatggtgtcacccacaatgtccccatctatgagggctatgccttgccccatgccatcatgcgtctggatctggctggccgagatctcactgactacctcatgaagatcctgactgagcgtggctattccttcgttactactgctgagcgtgagattgtccgggacatcaaggagaaactgtgttatgtagctctggactttgaaaatgagatggccactgccgcatcctcatcctcccttgagaagagttacgagttgcctgatgggcaagtgatcaccatcggaaatgaacgtttccgctgcccagagaccctgttccagccatccttcatcgggatggagtctgctggcatccatgaaaccacctacaacagcatcatgaagtgtgatattgacatcaggaaggacctctatgctaacaatgtcctatcagggggcaccactatgtaccctggcattgccgaccgaatgcagaaggagatcacggccctagcacccagcaccatgaagatcaagatcattgcccctccggagcgcaaatactctgtctggatcggtggctccatcctggcctctctgtccaccttccagcagatgtggatcagcaaacaggaatacgatgaagccgggccttccattgtccaccgcaaatgcttctaaaacactttcctgctcctctctgtctctagcacacaactgtgaatgtcctgtggaattatgccttcagttcttttccaaatcattcctagccaaagctctgactcgttacctatgtgttttttaataaatctgaaataggctactggtaa

SEQ ID NO: 195 - protein, 218 aa, Homo sapiens
MCEEEDSTALVCDNGSGLCKAGFAGDDAPRAVFPSIVGRPRHQGVMVGMGQKDSYVGDEAQSKRGILTLKYPIEHGIITNWDDMEKIWHHSFYNELRVAPEEHPTLLTEAPLNPKANREKMTQIMFETFNVPAMYVAIQAVLSLYASGRTTGIVLDSGDGVTHNVPIYEGYALPHAIMRLDLAGRDLTDYLMKILTERGYSFVTTAEREIVRDIKEKL

SEQ ID NO: 196 - DNA, 4122 bp, Homo sapiens
tttgtcatcagctcgctctccattggcggggagcggagagcagcgaagaagggggtggggaggggaggggaagggaagggggtggaaactgcctggagccgtttctccgcgccgctgttggtgctgccgctgcctcctcctcctccgccgccgccgccgccgccgccgcctcctccggctcttcgctcggcccctctccgcctccatgtgccggatagcgggagcgctgcggaccctgctgccgctgctggcggccctgcttcaggcgtctgtagaggcttctggtgaaatcgcattatgcaagactggatttcctgaagatgtttacagtgcagtcttatcgaaggatgtgcatgaaggacagcctcttctcaatgtgaagtttagcaactgcaatggaaaaagaaaagtacaatatgagagcagtgagcctgcagattttaaggtggatgaagatggcatggtgtatgccgtgagaagctttccactctcttctgagcatgccaagttcctgatatatgcccaagacaaagagacccaggaaaagtggcaagtggcagtaaaattgagcctgaagccaaccttaactgaggagtcagtgaaggagtcagcagaagttgaagaaatagtgttcccaagacaattcagtaagcacagtggccacctacaaaggcagaagagagactgggtcatccctccaatcaacttgccagaaaactccaggggaccttttcctcaagagcttgtcaggatcaggtctgatagagataaaaacctttcactgcggtacagtgtaactgggccaggagctgaccagcctccaactggtatcttcattatcaaccccatctcgggtcagctgtcggtgacaaagcccctggatcgcgagcagatagcccggtttcatttgagggcacatgcagtagatattaatggaaatcaagtggagaaccccattgacattgtcatcaatgttattgacatgaatgacaacagacctgagttcttacaccaggtttggaatgggacagttcctgagggatcaaagcctggaacatatgtgatgaccgtaacagcaattgatgctgacgatcccaatgccctcaatgggatgttgaggtacagaatcgtgtctcaggctccaagcaccccttcacccaacatgtttacaatcaacaatgagactggtgacatcatcacagtggcagctggacttgatcgagaaaaagtgcaacagtatacgttaataattcaagctacagacatggaaggcaatcccacatatggcctttcaaacacagccacggccgtcatcacagtgacagatgtcaatgacaatcctccagagtttactgccatgacgttttatggtgaagttcctgagaacagggtagacatcatagtagctaatctaactgtgaccgataaggatcaaccccatacaccagcctggaacgcagtgtacagaatcagtggcggagatcctactggacggttcgccatccagaccgacccaaacagcaacgacgggttagtcaccgtggtcaaaccaatcgactttgaaacaaataggatgtttgtccttactgttgctgcagaaaatcaagtgccattagccaagggaattcagcacccgcctcagtcaactgcaaccgtgtctgttacagttattgacgtaaatgaaaacccttattttgcccccaatcctaagatcattcgccaagaagaagggcttcatgccggtaccatgttgacaacattcactgctcaggacccagatcgatatatgcagcaaaatattagatacactaaattatctgatcctgccaattggctaaaaatagatcctgtgaatggacaaataactacaattgctgttttggaccgagaatcaccaaatgtgaaaaacaatatatataatgctactttccttgcttctgacaatggaattcctcctatgagtggaacaggaacgctgcagatctatttacttgatattaatgacaatgcccctcaagtgttacctcaagaggcagagacttgcgaaactccagaccccaattcaattaatattacagcacttgattatgacattgatccaaatgctggaccatttgcttttgatcttcctttatctccagtgactattaagagaaattggaccatcactcggcttaatggtgattttgctcagcttaatttaaagataaaatttcttgaagctggtatctatgaagttcccatcataatcacagattcgggtaatcctcccaaatcaaatatttccatcctgcgcgtgaaggtttgccagtgtgactccaacggggactgcacagatgtggacaggattgtgggtgcggggcttggcaccggtgccatcattgccatcctgctctgcatcatcatcctgcttatccttgtgctgatgtttgtggtatggatgaaacgccgggataaagaacgccaggccaaacaacttttaattgatccagaagatgatgtaagagataatattttaaaatatgatgaagaaggtggaggagaagaagaccaggactatgacttgagccagctgcagcagcctgacactgtggagcctgatgccatcaagcctgtgggaatccgacgaatggatgaaagacccatccacgctgagccccagtatccggtccgatctgcagccccacaccctggagacattggggacttcattaatgagggccttaaagcggctgacaatgaccccacagctccaccatatgactccctgttagtgtttgactatgaaggcagtggctccactgctgggtccttgagctcccttaattcctcaagtagtggtggtgagcaggactatgattacctgaacgactgggggccacggttcaagaaacttgctgacatgtatggtggaggtgatgactgaacttcagggtgaacttggtttttggacaagtacaaacaatttcaactgatattcccaaaaagcattcagaagctaggctttaactttgtagtctactagcacagtgcttgctggaggctttggcataggctgcaaaccaatttgggctcagagggaatatcagtgatccatactgtttggaaaaacactgagctcagttacacttgaattttacagtacagaagcactgggattttatgtgcctttttgtacctttttcagattggaattagttttctgtttaaggctttaatggtactgatttctgaaacgataagtaaaagacaaaatattttgtggtgggagcagtaagttaaaccatgatatgcttcaacacgcttttgttacattgcatttgcttttattaaaatacaaaattaaacaaacaaaaaaactcatggagcgattttattatcttgggggatgagaccatgagattggaaaatgtacattacttctagttttagactttagtttgttttttttttttcactaaaatcttaaaacttactcagctggttgcaaataaagggagttttcatatcaccaatttgtagcaaaattgaattttttcataaactagaatgttagacacattttggtcttaatccatgtacacttttttatttctgtatttttccacttcactgtaaaaatagtatgtgtacataatgttttattggcatagtctatggagaagtgcagaaacttcagaacatgtgtatgtattatttggactatggattcaggttttttgcatgtttatatctttcgttatggataaagtatttacaaaacagtgacatttgattcaattgttgagctgtagttagaatactcaatttttaatttttttaatttttttattttttattttctttttggtttggggagggagaaaagttcttagcacaaatgttttacataatttgtaccaaaaaaaaaaaaaaggaaaggaaagaaaggggtggcctgacactggtggcactactaagtgtgtgttttttaaaaaaaaaaatggaaaaaaaaaagcttttaaactggagagacttctgacaacagctttgcctctgtattgtgtaccagaatataaatgatacacctctgaccccagcgttctgaataaaatgctaattttggaaaaaaaaaaaaaaaaa

SEQ ID NO: 197 - protein, 906 aa, Homo sapiens
MCRIAGALRTLLPLLAALLQASVEASGEIALCKTGFPEDVYSAVLSKDVHEGQPLLNVKFSNCNGKRKVQYESSEPADFKVDEDGMVYAVRSFPLSSEHAKFLIYAQDKETQEKWQVAVKLSLKPTLTEESVKESAEVEEIVFPRQFSKHSGHLQRQKRDWVIPPINLPENSRGPFPQELVRIRSDRDKNLSLRYSVTGPGADQPPTGIFIINPISGQLSVTKPLDREQIARFHLRAHAVDINGNQVENPIDIVINVIDMNDNRPEFLHQVWNGTVPEGSKPGTYVMTVTAIDADDPNALNGMLRYRIVSQAPSTPSPNMFTINNETGDIITVAAGLDREKVQQYTLIIQATDMEGNPTYGLSNTATAVITVTDVNDNPPEFTAMTFYGEVPENRVDIIVANLTVTDKDQPHTPAWNAVYRISGGDPTGRFAIQTDPNSNDGLVTVVKPIDFETNRMFVLTVAAENQVPLAKGIQHPPQSTATVSVTVIDVNENPYFAPNPKIIRQEEGLHAGTMLTTFTAQDPDRYMQQNIRYTKLSDPANWLKIDPVNGQITTIAVLDRESPNVKNNIYNATFLASDNGIPPMSGTGTLQIYLLDINDNAPQVLPQEAETCETPDPNSINITALDYDIDPNAGPFAFDLPLSPVTIKRNWTITRLNGDFAQLNLKIKFLEAGIYEVPIIITDSGNPPKSNISILRVKVCQCDSNGDCTDVDRIVGAGLGTGAIIAILLCIIILLILVLMFVVWMKRRDKERQAKQLLIDPEDDVRDNILKYDEEGGGEEDQDYDLSQLQQPDTVEPDAIKPVGIRRMDERPIHAEPQYPVRSAAPHPGDIGDFINEGLKAADNDPTAPPYDSLLVFDYEGSGSTAGSLSSLNSSSSGGEQDYDYLNDWGPRFKKLADMYGGGDD

SEQ ID NO: 198 - DNA, 5921 bp, Homo sapiens
agcagacgggagtttctcctcggggtcggagcaggaggcacgcggagtgtgaggccacgcatgagcggacgctaaccccctccccagccacaaagagtctacatgtctagggtctagacatgttcagctttgtggacctccggctcctgctcctcttagcggccaccgccctcctgacgcacggccaagaggaaggccaagtcgagggccaagacgaagacatcccaccaatcacctgcgtacagaacggcctcaggtaccatgaccgagacgtgtggaaacccgagccctgccggatctgcgtctgcgacaacggcaaggtgttgtgcgatgacgtgatctgtgacgagaccaagaactgccccggcgccgaagtccccgagggcgagtgctgtcccgtctgccccgacggctcagagtcacccaccgaccaagaaaccaccggcgtcgagggacccaagggagacactggcccccgaggcccaaggggacccgcaggcccccctggccgagatggcatccctggacagcctggacttcccggaccccccggaccccccggacctcccggaccccctggcctcggaggaaactttgctccccagctgtcttatggctatgatgagaaatcaaccggaggaatttccgtgcctggccccatgggtccctctggtcctcgtggtctccctggcccccctggtgcacctggtccccaaggcttccaaggtccccctggtgagcctggcgagcctggagcttcaggtcccatgggtccccgaggtcccccaggtccccctggaaagaatggagatgatggggaagctggaaaacctggtcgtcctggtgagcgtgggcctcctgggcctcagggtgctcgaggattgcccggaacagctggcctccctggaatgaagggacacagaggtttcagtggtttggatggtgccaagggagatgctggtcctgctggtcctaagggtgagcctggcagccctggtgaaaatggagctcctggtcagatgggcccccgtggcctgcctggtgagagaggtcgccctggagcccctggccctgctggtgctcgtggaaatgatggtgctactggtgctgccgggccccctggtcccaccggccccgctggtcctcctggcttccctggtgctgttggtgctaagggtgaagctggtccccaagggccccgaggctctgaaggtccccagggtgtgcgtggtgagcctggcccccctggccctgctggtgctgctggccctgctggaaaccctggtgctgatggacagcctggtgctaaaggtgccaatggtgctcctggtattgctggtgctcctggcttccctggtgcccgaggcccctctggaccccagggccccggcggccctcctggtcccaagggtaacagcggtgaacctggtgctcctggcagcaaaggagacactggtgctaagggagagcctggccctgttggtgttcaaggaccccctggccctgctggagaggaaggaaagcgaggagctcgaggtgaacccggacccactggcctgcccggaccccctggcgagcgtggtggacctggtagccgtggtttccctggcgcagatggtgttgctggtcccaagggtcccgctggtgaacgtggttctcctggccccgctggccccaaaggatctcctggtgaagctggtcgtcccggtgaagctggtctgcctggtgccaagggtctgactggaagccctggcagccctggtcctgatggcaaaactggcccccctggtcccgccggtcaagatggtcgccccggacccccaggcccacctggtgcccgtggtcaggctggtgtgatgggattccctggacctaaaggtgctgctggagagcccggcaaggctggagagcgaggtgttcccggaccccctggcgctgtcggtcctgctggcaaagatggagaggctggagctcagggaccccctggccctgctggtcccgctggcgagagaggtgaacaaggccctgctggctcccccggattccagggtctccctggtcctgctggtcctccaggtgaagcaggcaaacctggtgaacagggtgttcctggagaccttggcgcccctggcccctctggagcaagaggcgagagaggtttccctggcgagcgtggtgtgcaaggtccccctggtcctgctggaccccgaggggccaacggtgctcccggcaacgatggtgctaagggtgatgctggtgcccctggagctcccggtagccagggcgcccctggccttcagggaatgcctggtgaacgtggtgcagctggtcttccagggcctaagggtgacagaggtgatgctggtcccaaaggtgctgatggctctcctggcaaagatggcgtccgtggtctgaccggccccattggtcctcctggccctgctggtgcccctggtgacaagggtgaaagtggtcccagcggccctgctggtcccactggagctcgtggtgcccccggagaccgtggtgagcctggtccccccggccctgctggctttgctggcccccctggtgctgacggccaacctggtgctaaaggcgaacctggtgatgctggtgccaaaggcgatgctggtccccctgggcctgccggacccgctggaccccctggccccattggtaatgttggtgctcctggagccaaaggtgctcgcggcagcgctggtccccctggtgctactggtttccctggtgctgctggccgagtcggtcctcctggcccctctggaaatgctggaccccctggccctcctggtcctgctggcaaagaaggcggcaaaggtccccgtggtgagactggccctgctggacgtcctggtgaagttggtccccctggtccccctggccctgctggcgagaaaggatcccctggtgctgatggtcctgctggtgctcctggtactcccgggcctcaaggtattgctggacagcgtggtgtggtcggcctgcctggtcagagaggagagagaggcttccctggtcttcctggcccctctggtgaacctggcaaacaaggtccctctggagcaagtggtgaacgtggtccccccggtcccatgggcccccctggattggctggaccccctggtgaatctggacgtgagggggctcctgctgccgaaggttcccctggacgagacggttctcctggcgccaagggtgaccgtggtgagaccggccccgctggaccccctggtgctcctggtgctcctggtgcccctggccccgttggccctgctggcaagagtggtgatcgtggtgagactggtcctgctggtcccgccggtcccgtcggccccgtcggcgcccgtggccccgccggaccccaaggcccccgtggtgacaagggtgagacaggcgaacagggcgacagaggcataaagggtcaccgtggcttctctggcctccagggtccccctggccctcctggctctcctggtgaacaaggtccctctggagcctctggtcctgctggtccccgaggtccccctggctctgctggtgctcctggcaaagatggactcaacggtctccctggccccattgggccccctggtcctcgcggtcgcactggtgatgctggtcctgttggtccccccggccctcctggacctcctggtccccctggtcctcccagcgctggtttcgacttcagcttcctgccccagccacctcaagagaaggctcacgatggtggccgctactaccgggctgatgatgccaatgtggttcgtgaccgtgacctcgaggtggacaccaccctcaagagcctgagccagcagatcgagaacatccggagcccagagggaagccgcaagaaccccgcccgcacctgccgtgacctcaagatgtgccactctgactggaagagtggagagtactggattgaccccaaccaaggctgcaacctggatgccatcaaagtcttctgcaacatggagactggtgagacctgcgtgtaccccactcagcccagtgtggcccagaagaactggtacatcagcaagaaccccaaggacaagaggcatgtctggttcggcgagagcatgaccgatggattccagttcgagtatggcggccagggctccgaccctgccgatgtggccatccagctgaccttcctgcgcctgatgtccaccgaggcctcccagaacatcacctaccactgcaagaacagcgtggcctacatggaccagcagactggcaacctcaagaaggccctgctcctcaagggctccaacgagatcgagatccgcgccgagggcaacagccgcttcacctacagcgtcactgtcgatggctgcacgagtcacaccggagcctggggcaagacagtgattgaatacaaaaccaccaagtcctcccgcctgcccatcatcgatgtggcccccttggacgttggtgccccagaccaggaattcggcttcgacgttggccctgtctgcttcctgtaaactccctccatcccaacctggctccctcccacccaaccaactttccccccaacccggaaacagacaagcaacccaaactgaacccccccaaaagccaaaaaatgggagacaatttcacatggactttggaaaatatttttttcctttgcattcatctctcaaacttagtttttatctttgaccaaccgaacatgaccaaaaaccaaaagtgcattcaaccttaccaaaaaaaaaaaaaaaaaaaaaagaataaataaataagtttttaaaaaaggaagcttggtccacttgcttgaagacccatgcgggggtaagtccctttctgcccgttgggttatgaaaccccaatgctgccctttctgctcctttctccacaccccccttggcctcccctccactccttcccaaatctgtctccccagaagacacaggaaacaatgtattgtctgcccagcaatcaaaggcaatgctcaaacacccaagtggcccccaccctcagcccgctcctgcccgcccagcacccccaggccctggggacctggggttctcagactgccaaagaagccttgccatctggcgctcccatggctcttgcaacatctccccttcgtttttgagggggtcatgccgggggagccaccagcccctcactgggttcggaggagagtcaggaagggccacgacaaagcagaaacatcggatttggggaacgcgtgtcatcccttgtgccgcaggctgggcgggagagactgttctgttctgttccttgtgtaactgtgttgctgaaagactacctcgttcttgtcttgatgtgtcaccggggcaactgcctgggggcggggatgggggcagggtggaagcggctccccatttttataccaaaggtgctacatctatgtgatgggtggggtggggagggaatcactggtgctatagaaattgagatgcccccccaggccagcaaatgttcctttttgttcaaagtctatttttattccttgatattttttctttctttttttttttttttgtggatggggacttgtgaatttttctaaaggtgctatttaacatgggaggagagcgtgtgcgctccagcccagcccgctgctcactttccaccctctctccacctgcctctggcttctcaggcctctgctctccgacctctctcctctgaaaccctcctccacagctgcagcccatcctcccggctccctcctagtctgtcctgcgtcctctgtccccgggtttcagagacaacttcccaaagcacaaagcagtttttccctaggggtgggaggaagcaaaagactctgtacctattttgtatgtgtataataatttgagatgtttttaattattttgattgctggaataaagcatgtggaaatgacccaaacataa

SEQ ID NO: 199 - protein, 1464 aa, Homo sapiens
MFSFVDLRLLLLLAATALLTHGQEEGQVEGQDEDIPPITCVQNGLRYHDRDVWKPEPCRICVCDNGKVLCDDVICDETKNCPGAEVPEGECCPVCPDGSESPTDQETTGVEGPKGDTGPRGPRGPAGPPGRDGIPGQPGLPGPPGPPGPPGPPGLGGNFAPQLSYGYDEKSTGGISVPGPMGPSGPRGLPGPPGAPGPQGFQGPPGEPGEPGASGPMGPRGPPGPPGKNGDDGEAGKPGRPGERGPPGPQGARGLPGTAGLPGMKGHRGFSGLDGAKGDAGPAGPKGEPGSPGENGAPGQMGPRGLPGERGRPGAPGPAGARGNDGATGAAGPPGPTGPAGPPGFPGAVGAKGEAGPQGPRGSEGPQGVRGEPGPPGPAGAAGPAGNPGADGQPGAKGANGAPGIAGAPGFPGARGPSGPQGPGGPPGPKGNSGEPGAPGSKGDTGAKGEPGPVGVQGPPGPAGEEGKRGARGEPGPTGLPGPPGERGGPGSRGFPGADGVAGPKGPAGERGSPGPAGPKGSPGEAGRPGEAGLPGAKGLTGSPGSPGPDGKTGPPGPAGQDGRPGPPGPPGARGQAGVMGFPGPKGAAGEPGKAGERGVPGPPGAVGPAGKDGEAGAQGPPGPAGPAGERGEQGPAGSPGFQGLPGPAGPPGEAGKPGEQGVPGDLGAPGPSGARGERGFPGERGVQGPPGPAGPRGANGAPGNDGAKGDAGAPGAPGSQGAPGLQGMPGERGAAGLPGPKGDRGDAGPKGADGSPGKDGVRGLTGPIGPPGPAGAPGDKGESGPSGPAGPTGARGAPGDRGEPGPPGPAGFAGPPGADGQPGAKGEPGDAGAKGDAGPPGPAGPAGPPGPIGNVGAPGAKGARGSAGPPGATGFPGAAGRVGPPGPSGNAGPPGPPGPAGKEGGKGPRGETGPAGRPGEVGPPGPPGPAGEKGSPGADGPAGAPGTPGPQGIAGQRGVVGLPGQRGERGFPGLPGPSGEPGKQGPSGASGERGPPGPMGPPGLAGPPGESGREGAPAAEGSPGRDGSPGAKGDRGETGPAGPPGAPGAPGAPGPVGPAGKSGDRGETGPAGPAGPVGPVGARGPAGPQGPRGDKGETGEQGDRGIKGHRGFSGLQGPPGPPGSPGEQGPSGASGPAGPRGPPGSAGAPGKDGLNGLPGPIGPPGPRGRTGDAGPVGPPGPPGPPGPPGPPSAGFDFSFLPQPPQEKAHDGGRYYRADDANVVRDRDLEVDTTLKSLSQQIENIRSPEGSRKNPARTCRDLKMCHSDWKSGEYWIDPNQGCNLDAIKVFCNMETGETCVYPTQPSVAQKNWYISKNPKDKRHVWFGESMTDGFQFEYGGQGSDPADVAIQLTFLRLMSTEASQNITYHCKNSVAYMDQQTGNLKKALLLKGSNEIEIRAEGNSRFTYSVTVDGCTSHTGAWGKTVIEYKTTKSSRLPIIDVAPLDVGAPDQEFGFDVGPVCFL

SEQ ID NO: 200 - DNA, 2580 bp, Homo sapiens
tcgggccccgcggccgcctttataaggcggcgggggtggtggcccgggccgcgttgcgctcccgccactccgcgcccgctatcctggctccgtgctcccacgcgcttgtgcctggacggaccctcgccagtgctctgcgcaggattggaacatcagttaacatctgaccactgccagcccaccccctcccacccacgtcgattgcatctctgggctccagggataaagcaggtcttggggtgcaccatgatttcaccattcttagtactggccattggcacctgccttactaactccttagtgccagagaaagagaaagaccccaagtactggcgagaccaagcgcaagagacactgaaatatgccctggagcttcagaagctcaacaccaacgtggctaagaatgtcatcatgttcctgggagatgggatgggtgtctccacagtgacggctgcccgcatcctcaagggtcagctccaccacaaccctggggaggagaccaggctggagatggacaagttccccttcgtggccctctccaagacgtacaacaccaatgcccaggtccctgacagcgccggcaccgccaccgcctacctgtgtggggtgaaggccaatgagggcaccgtgggggtaagcgcagccactgagcgttcccggtgcaacaccacccaggggaacgaggtcacctccatcctgcgctgggccaaggacgctgggaaatctgtgggcattgtgaccaccacgagagtgaaccatgccacccccagcgccgcctacgcccactcggctgaccgggactggtactcagacaacgagatgccccctgaggccttgagccagggctgtaaggacatcgcctaccagctcatgcataacatcagggacattgacgtgatcatggggggtggccggaaatacatgtaccccaagaataaaactgatgtggagtatgagagtgacgagaaagccaggggcacgaggctggacggcctggacctcgttgacacctggaagagcttcaaaccgagatacaagcactcccacttcatctggaaccgcacggaactcctgacccttgacccccacaatgtggactacctattgggtctcttcgagccaggggacatgcagtacgagctgaacaggaacaacgtgacggacccgtcactctccgagatggtggtggtggccatccagatcctgcggaagaaccccaaaggcttcttcttgctggtggaaggaggcagaattgaccacgggcaccatgaaggaaaagccaagcaggccctgcatgaggcggtggagatggaccgggccatcgggcaggcaggcagcttgacctcctcggaagacactctgaccgtggtcactgcggaccattcccacgtcttcacatttggtggatacaccccccgtggcaactctatctttggtctggcccccatgctgagtgacacagacaagaagcccttcactgccatcctgtatggcaatgggcctggctacaaggtggtgggcggtgaacgagagaatgtctccatggtggactatgctcacaacaactaccaggcgcagtctcctgtgcccctgcgccacgagacccacggcggggaggacgtggccgtcttctccaagggccccatggcgcacctgctgcacggcgtccacgagcagaactacgtcccccacgtgatggcgtatgcagcctgcatcggggccaacctcggccactgtgctcctgccagctcggcaggcagccttgctgcaggccccctgctgctcgctctggccctctaccccctgagcgtcctgttctgagggcccagggcccgggcacccacaagcccgtgacagatgccaacttcccacacggcagcccccccctcaaggggcagggaggtgggggcctcctcagcctctgcaactgcaagaaaggggacccaggaaaccaaagtctgccgcccacctcgctcccctctggaatcttccccaagggccaaacccacttctggcctccagcctttgctccctccccgctgccctttggccaccagggtagatttctcttgggcaggcagagagtacagactgcagacattctcaaagcctcttatttttctagcgaacgtatttctccagacccagaggccctgaagcctccgtggaacattgtggatctgaccctcccagtctcatctcctgaccctcccactcccatctccttacctctggaaccccccaggccctacaatgctcatgtccctgtccccaggcgagccctccttcaggggagttgaggtctttctcctcaggacaaggccttgctcactcactcactccaagaccaccagggtcccaggaagccggtgcctgggtggccatcctacccagcgtgcccaggccgggaagagccacctggcagggctcacactcctgggctctgaacacacacgccagctcctctctgaagcgactctcctgtttggaacggcaaaaaaaaatttttttttctctttttggtggtggttaaaagggaacacaaaacatttaaataaaactttccaaatatttccgagg

SEQ ID NO: 201 - protein, 524 aa, Homo sapiens
MISPFLVLAIGTCLTNSLVPEKEKDPKYWRDQAQETLKYALELQKLNTNVAKNVIMFLGDGMGVSTVTAARILKGQLHHNPGEETRLEMDKFPFVALSKTYNTNAQVPDSAGTATAYLCGVKANEGTVGVSAATERSRCNTTQGNEVTSILRWAKDAGKSVGIVTTTRVNHATPSAAYAHSADRDWYSDNEMPPEALSQGCKDIAYQLMHNIRDIDVIMGGGRKYMYPKNKTDVEYESDEKARGTRLDGLDLVDTWKSFKPRYKHSHFIWNRTELLTLDPHNVDYLLGLFEPGDMQYELNRNNVTDPSLSEMVVVAIQILRKNPKGFFLLVEGGRIDHGHHEGKAKQALHEAVEMDRAIGQAGSLTSSEDTLTVVTADHSHVFTFGGYTPRGNSIFGLAPMLSDTDKKPFTAILYGNGPGYKVVGGERENVSMVDYAHNNYQAQSPVPLRHETHGGEDVAVFSKGPMAHLLHGVHEQNYVPHVMAYAACIGANLGHCAPASSAGSLAAGPLLLALALYPLSVLF

SEQ ID NO: 202 - DNA, 498 bp, Homo sapiens
cgcagccaccgagacaccatgagagccctcacactcctcgccctattggccctggccgcactttgcatcgctggccaggcaggtgcgaagcccagcggtgcagagtccagcaaaggtgcagcctttgtgtccaagcaggagggcagcgaggtagtgaagagacccaggcgctacctgtatcaatggctgggagccccagtcccctacccggatcccctggagcccaggagggaggtgtgtgagctcaatccggactgtgacgagttggctgaccacatcggctttcaggaggcctatcggcgcttctacggcccggtctagggtgtcgctctgctggcctggccggcaaccccagttctgctcctctccaggcacccttctttcctcttccccttgcccttgccctgacctcccagccctatggatgtggggtccccatcatcccagctgctcccaaataaactccagaagaggaatctgaaaaaaaaaaaaaaaaaa

SEQ ID NO: 203 - protein, 100 aa, Homo sapiens
MRALTLLALLALAALCIAGQAGAKPSGAESSKGAAFVSKQEGSEVVKRPRRYLYQWLGAPVPYPDPLEPRREVCELNPDCDELADHIGFQEAYRRFYGPV

SEQ ID NO: 204 - DNA, 51 bp, Homo sapiens
  misc_feature 26: n = adenine or guanine
ccttcaatgactccctcacattcttngagaatgctgcagacgttggggggc

SEQ ID NO: 205 - DNA, 51 bp, Homo sapiens
  misc_feature 26: n = cytosine or guanine
ttgcatctaagggtataatgcagaanaaagaggcaccctgtaactcacccc

SEQ ID NO: 206 - DNA, 51 bp, Homo sapiens
  misc_feature 26: n = guanine or thymine
tggagaggctccagctttatctcttnctgggttcaaatctgggtatggtag

SEQ ID NO: 207 - DNA, 51 bp, Homo sapiens
  misc_feature 26: n = adenine or guanine
ggggacctcagaggagccactcatcngcctgtcctttctgttcttccccct

SEQ ID NO: 208 - DNA, 51 bp, Homo sapiens
  misc_feature 26: n = guanine or thymine
ctctgagaaagtgagcttccagcccnaacttggaccctctgcagaggggca

SEQ ID NO: 209 - DNA, 51 bp, Homo sapiens
  misc_feature 26: xxx
gacatggggggttttctacctaaggnagaagggcccgggagccaactccag

SEQ ID NO: 210 - DNA, 51 bp, Homo sapiens
  misc_feature 26: n = cytosine or thymine
caggtaccagagcctgctcggcgacnctccaggaagctggccggtcacggt

SEQ ID NO: 211 - DNA, 51 bp, Homo sapiens
  misc_feature 26: n = cytosine or thymine
agtcaccttttatcctcaggggatanattccaagacgccccagtggatgcc

SEQ ID NO: 212 - DNA, 51 bp, Homo sapiens
  misc_feature 26: n = adenine or guanine
ctgcaggtaggtggaaaaaaagacangagccatacagagaaaacaccctct

SEQ ID NO: 213 - DNA, 51 bp, Homo sapiens
  misc_feature 26: n = adenine or cytosine
gttggagacgagaagggcttggattnagtatcggaaagctgctcccaattg

SEQ ID NO: 214 - DNA, 51 bp, Homo sapiens
  misc_feature 26: n = adenine or guanine
ccgggggcatgaagctcagtttggtnagcaccacctggcaggtgtaccaaa

SEQ ID NO: 215 - DNA, 51 bp, Homo sapiens
  misc_feature 26: n = adenine or guanine
gggcggcgttaagggcccggggctgnctcggagcaggttagggaacagcgc

SEQ ID NO: 216 - DNA, 51 bp, Homo sapiens
  misc_feature 26: n = cytosine or thymine
gcctccgcatcctcctctcctccccncaggactacccttaacccactcagg

SEQ ID NO: 217 - DNA, 51 bp, Homo sapiens
  misc_feature 26: n = adenine or guanine
cccatgcgctccccaagcccaaggtnaccctgtgcaggaggcaaaggtggt

SEQ ID NO: 218 - DNA, 51 bp, Homo sapiens
  misc_feature 26: n = adenine or guanine
tccttcagctgtaatcagcagacacnggggacaggatggccaggggcacag

SEQ ID NO: 219 - DNA, 51 bp, Homo sapiens
  misc_feature 26: n = adenine or guanine
gcctgtgtgtgcctgggttctctctntcccggaatgtgccaacaatggagg

SEQ ID NO: 220 - DNA, 51 bp, Homo sapiens
  misc_feature 26: n = adenine or guanine
gaactcctgacctcgtgatccacctncctcggcctcccaaagtgctgggat

SEQ ID NO: 221 - DNA, 51 bp, Homo sapiens
  misc_feature 26: n = cytosine or thymine
cggaggttgcagtgagctgaaattangccactgcactccagcctgggtgat

SEQ ID NO: 222 - DNA, 51 bp, Homo sapiens
  misc_feature 26: n = cytosine or guanine
gttagggtgcgagaacccgggtcggngacgcgggtgagccgcgcggtaatc

SEQ ID NO: 223 - DNA, 51 bp, Homo sapiens
  misc_feature 26: n = adenine or guanine
gggaagcgaatactccacagggcacngtctcccaatgcaaaatgggcacct

SEQ ID NO: 224 - DNA, 51 bp, Homo sapiens
  misc_feature 26: n = cytosine or guanine
agttccagtgtggccgctcacacgcntctaccagcctgctagagtcctgga

SEQ ID NO: 225 - DNA, 51 bp, Homo sapiens
  misc_feature 26: n = cytosine or thymine
ataaataaatgaatgagcgaagtgangtgaatcctaactgccatcttcacc

SEQ ID NO: 226 - DNA, 51 bp, Homo sapiens
  misc_feature 26: n = guanine or thymine
gtgaaaggacttagggaagttttccngggggctgaagtttgaggggacctt

SEQ ID NO: 227 - DNA, 51 bp, Homo sapiens
  misc_feature 26: n = guanine or thymine
actgcgaggctggggaacagcctgtncgttggtcagtggtccccaaatatg

SEQ ID NO: 228 - DNA, 51 bp, Homo sapiens
  misc_feature 26: n = cytosine or thymine
ctgcgaggctggggaacagcctgtgngttggtcagtggtccccaaatatgt

SEQ ID NO: 229 - DNA, 51 bp, Homo sapiens
  misc_feature 26: n = cytosine or thymine
tttccaagagaagttaaaggctctgnggagtccttcagtgacagaactggt

SEQ ID NO: 230 - DNA, 51 bp, Homo sapiens
  misc_feature 26: n = cytosine or thymine
cagcattcgtagcctgaaggtgggtnggagggcagtggctgctgcatggtg

SEQ ID NO: 231 - DNA, 51 bp, Homo sapiens
  misc_feature 26: n = adenine or guanine
gccagacctgagtgctagctgtgtgnccttgagtgaggcacttgacctttc

SEQ ID NO: 232 - DNA, 51 bp, Homo sapiens
  misc_feature 26: n = cytosine or thymine
tttctatttcactccgcggtatctgnatcgggcctcactggcttcaggagc

SEQ ID NO: 233 - DNA, 51 bp, Homo sapiens
  misc_feature 26: n = adenine or guanine
taccctcccaggcacacacaggtggnacacaaataagggttttggaaccac

SEQ ID NO: 234 - DNA, 51 bp, Homo sapiens
  misc_feature 26: n = cytosine or guanine
agagatccagaaatcgagatgagtgntggcctcgtgaatgggagctctgtc

SEQ ID NO: 235 - DNA, 51 bp, Homo sapiens
  misc_feature 26: n = cytosine or thymine
ttccaggaagagaaaacaacaaagantatttttctcctgagcttctcgtgc

SEQ ID NO: 236 - DNA, 51 bp, Homo sapiens
  misc_feature 26: n = adenine or guanine
catatagtcttgtagaagcacagaantcaaaagtgtagctaatgcttgata

SEQ ID NO: 237 - DNA, 51 bp, Homo sapiens
  misc_feature 26: n = adenine or guanine
attataaactgcctcctttagtcacnttgtagctctttctgaagtgctaag

SEQ ID NO: 238 - DNA, 51 bp, Homo sapiens
  misc_feature 26: n = adenine or guanine
gatataagtaagacctgagttttgtnttagcatgtaggttaaagcatgtgg

SEQ ID NO: 239 - DNA, 51 bp, Homo sapiens
  misc_feature 26: n = adenine or guanine
aaaaaaaaaaaaaaaaaaaaaggcgnggcctattattatacttttaccacg

SEQ ID NO: 240 - DNA, 51 bp, Homo sapiens
  misc_feature 26: n = adenine or guanine
tgtaactctttgtgactgaagaagangttgaagtgtgcattgccacctcag

SEQ ID NO: 241 - DNA, 51 bp, Homo sapiens
  misc_feature 26: n = guanine or thymine
acttaatgctgatatgctcacaattnctgtataaaatagaagttgagaaag

SEQ ID NO: 242 - DNA, 51 bp, Homo sapiens
  misc_feature 26: n = cytosine or thymine
atagttaaatttggtattcgtggggnaagaaatgaccatttcccttgtatt

SEQ ID NO: 243 - DNA, 51 bp, Homo sapiens
  misc_feature 26: n = adenine or guanine
taatgggctttacattttaaacatancttgaaataacaaatcatgactata

SEQ ID NO: 244 - DNA, 51 bp, Homo sapiens
  misc_feature 26: n = guanine or thymine
tgggtagtttataaaggaaataggtntaattgacttactgttccccatggc

SEQ ID NO: 245 - DNA, 51 bp, Homo sapiens
  misc_feature 26: n = adenine or thymine
atgctctagaagctaacactcacacnggcagtcttggtgttttccaggtag

SEQ ID NO: 246 - DNA, 51 bp, Homo sapiens
  misc_feature 26: n = cytosine or thymine
aaactggtctatgacataatcacttnggtggactctattctagacacagtg

SEQ ID NO: 247 - DNA, 51 bp, Homo sapiens
  misc_feature 26: n = adenine or guanine
gggtcagagaatgtggcaacttatangttctatatcttttgctcagatggt

SEQ ID NO: 248 - DNA, 51 bp, Homo sapiens
  misc_feature 26: n = adenine or guanine
atcttgtgagaactcactcactattntgagaacagcatgagcagcatgagg

SEQ ID NO: 249 - DNA, 51 bp, Homo sapiens
  misc_feature 26: n = adenine or guanine
gctggagggtttagaaactttgagtngcaagatggaagaaaaggaataaat

SEQ ID NO: 250 - DNA, 51 bp, Homo sapiens
  misc_feature 26: n = adenine or guanine
ttcctggcctggctgtgatacctatncacaagtattttacaccattcttac

SEQ ID NO: 251 - DNA, 51 bp, Homo sapiens
  misc_feature 26: n = adenine or guanine
gttgtgtcttttgcagacaagtaatntagtatcttgcaggtaaacttataa

SEQ ID NO: 252 - DNA, 51 bp, Homo sapiens
  misc_feature 26: n = adenine or thymine
gcatttgtgcgcttcctccttatggnttaaccttggtttagtttctatgca

SEQ ID NO: 253 - DNA, 51 bp, Homo sapiens
  misc_feature 26: n = cytosine or thymine
cctcatttagatcttttgctcataangacacaagcaaacaaccagggctga

SEQ ID NO: 254 - DNA, 51 bp, Homo sapiens
  misc_feature 26: n = cytosine or thymine
ggttttataaaagtaactttattttnagcttgtctgtagattcaattttct

SEQ ID NO: 255 - DNA, 51 bp, Homo sapiens
  misc_feature 26: n = adenine or guanine
cttgtacagactagagggtcacattntgtaaagcctaacatagccctgcaa

SEQ ID NO: 256 - DNA, 51 bp, Homo sapiens
  misc_feature 26: n = guanine or thymine
agctcagaacgattggaaataaattngaaatgtaaccgagcattccgagtc

SEQ ID NO: 257 - DNA, 51 bp, Homo sapiens
  misc_feature 26: n = cytosine or thymine
ggccaggacagttcatttctggctcntgtgggggccagttcccagagagca

SEQ ID NO: 258 - DNA, 51 bp, Homo sapiens
  misc_feature 26: n = guanine or thymine
gacatttcacccttccttttgtttcntgcagctggtgcccctgtagggaaa

SEQ ID NO: 259 - DNA, 51 bp, Homo sapiens
  misc_feature 26: n = adenine or guanine
ccaaagatctccctgggaggattacngggaatgtgagctcagtggggggtc

SEQ ID NO: 260 - DNA, 51 bp, Homo sapiens
  misc_feature 26: n = guanine or thymine
gatgacatggaagctgcagagctggnttgtcccaggtggcctagctcagat

SEQ ID NO: 261 - DNA, 51 bp, Homo sapiens
  misc_feature 26: n = adenine or guanine
ccaggtggcctagctcagatgccacnaggagggaactgttgcaggctaact

SEQ ID NO: 262 - DNA, 51 bp, Homo sapiens
  misc_feature 26: n = adenine or guanine
ccagatggccacaccagagagcaggncaacttaaagagataatgcacacac

SEQ ID NO: 263 - DNA, 51 bp, Homo sapiens
  misc_feature 26: n = adenine or thymine
caaatacaaaaaaaaagccacctttnatttttcaagtagctgaaattatta

SEQ ID NO: 264 - DNA, 51 bp, Homo sapiens
  misc_feature 26: n = cytosine or thymine
ttcctctgggcttactgagattcccnaagtcagagtgaggccactcctttc

SEQ ID NO: 265 - DNA, 51 bp, Homo sapiens
  misc_feature 26: n = cytosine or thymine
acgctgcaggaagaccatgaggaagncaaagcccacgaagaccatggcatg

SEQ ID NO: 266 - DNA, 51 bp, Homo sapiens
  misc_feature 26: n = adenine or guanine
ttgtaccccagcgtggagacagtccnagccaagaagccagctgccagagcc

SEQ ID NO: 267 - DNA, 51 bp, Homo sapiens
  misc_feature 26: n = adenine or thymine
ttgccacttatgtccctgtcctgagnctgaggagcggggaatagcaagggc

SEQ ID NO: 268 - DNA, 51 bp, Homo sapiens
  misc_feature 26: n = adenine or guanine
gatagttccaagctctatcacctccntgaagcctcccatagcccaggcaat

SEQ ID NO: 269 - DNA, 51 bp, Homo sapiens
  misc_feature 26: n = adenine or cytosine
gagaaaaaaagtcctgaaaacaaaancccgacaacaaccttaaagtaggag

SEQ ID NO: 270 - DNA, 51 bp, Homo sapiens
  misc_feature 26: n = adenine or guanine
gccgagtggagctgcctgtgcacacncctggacagagagaagcagaggatg

SEQ ID NO: 271 - DNA, 51 bp, Homo sapiens
  misc_feature 26: n = adenine or guanine
gtgcctcgctgaaggggtactccacngtcaccatgtaggagtactgcagca

SEQ ID NO: 272 - DNA, 51 bp, Homo sapiens
  misc_feature 26: n = adenine or guanine
cgaccgccctgaagcctcccgcatcnccctgctcctgatggccagccagga

SEQ ID NO: 273 - DNA, 51 bp, Homo sapiens
  misc_feature 26: n = cytosine or thymine
gtctgtgcagttccacttccggtccngacagacactaggagcagtcatggc

SEQ ID NO: 274 - DNA, 51 bp, Homo sapiens
  misc_feature 26: n = cytosine or thymine
agtgtaccaaaacgtgccagaactangacctggagtgcatgagcatgggct

SEQ ID NO: 275 - DNA, 51 bp, Homo sapiens
  misc_feature 26: n = cytosine or thymine
gttccaggtgacctccgcatccagcntacagtgacggcctccgtgcgcctc

SEQ ID NO: 276 - DNA, 51 bp, Homo sapiens
  misc_feature 26: n = guanine or thymine
gggagtgccttgtcacaggtcaatcncacttcaagagctttgacaacagat

SEQ ID NO: 277 - DNA, 51 bp, Homo sapiens
  misc_feature 26: n = adenine or thymine
tctctccaggggagtgccttgtcacnggtcaatcacacttcaagagctttg

SEQ ID NO: 278 - DNA, 51 bp, Homo sapiens
  misc_feature 26: n = cytosine or guanine
acatttatctccccaagtaggctctnagatccagttcagcacccaggacaa

SEQ ID NO: 279 - DNA, 36 bp, Homo sapiens
  misc_feature 11: n = adenine or thymine
gaactggcaantggataaacaaaatgtagcctatcc

SEQ ID NO: 280 - DNA, 51 bp, Homo sapiens
  misc_feature 26: n = cytosine or thymine
ggataaacaaaatgtagcctatccanccaaggaaatagatttcagctataa

SEQ ID NO: 281 - DNA, 51 bp, Homo sapiens
  misc_feature 26: n = adenine or guanine
ctgctgcaagaatggctataactaanaagtcaaaaattttactagatgtcg

SEQ ID NO: 282 - DNA, 51 bp, Homo sapiens
  misc_feature 26: n = adenine or guanine
cccttgggggtccccaatcccgaagngtgggagttcggatgccgcctcctt

SEQ ID NO: 283 - DNA, 51 bp, Homo sapiens
  misc_feature 26: n = cytosine or thymine
acctgcttcgagtgtaaaaattcagncggattatctcatgaactgtctggc

SEQ ID NO: 284 - DNA, 51 bp, Homo sapiens
  misc_feature 26: n = cytosine or thymine
gaggcaggaggaggggtccattttanaagagctctcccatgagacgctagg

SEQ ID NO: 285 - DNA, 51 bp, Homo sapiens
  misc_feature 26: n = guanine or thymine
tccccagaggggaagaggagtgccanctccccgggacagttcacggacctg

SEQ ID NO: 286 - DNA, 51 bp, Homo sapiens
  misc_feature 26: n = adenine or guanine
ggcaaagacatcactcttccccagangttggcagtatctcacactgacact

SEQ ID NO: 287 - DNA, 51 bp, Homo sapiens
  misc_feature 26: n = adenine or cytosine
ccctgctgctgcaggccccagatgancccccagaactcttccttctgcccc

SEQ ID NO: 288 - DNA, 51 bp, Homo sapiens
  misc_feature 26: n = cytosine or thymine
gccacatgtttgtctgcggcgatgtnaccatggcaaccaacgtcctgcaga

SEQ ID NO: 289 - DNA, 51 bp, Homo sapiens
  misc_feature 26: n = cytosine or guanine
cagagctggaacataacatgaagcangtcaaaagtcatgccctcctcccgc

SEQ ID NO: 290 - DNA, 51 bp, Homo sapiens
  misc_feature 26: n = adenine or guanine
gcacaagcagcgcggcgaagagtgcncccgcgaagaaaacgagctggcggg

SEQ ID NO: 291 - DNA, 51 bp, Homo sapiens
  misc_feature 26: n = cytosine or thymine
tgggagaatctctccttcccatttcnagtgcacccaccaactctggaacag

SEQ ID NO: 292 - DNA, 51 bp, Homo sapiens
  misc_feature 26: n = cytosine or thymine
ttcaccttgagggaccctagaaaaanagaaaacccatttaatggtccaggt

SEQ ID NO: 293 - DNA, 51 bp, Homo sapiens
  misc_feature 26: n = adenine or guanine
tccaggtgtttaggccaaaagccctngatggtgaaggcctgtcaaagatga

SEQ ID NO: 294 - DNA, 51 bp, Homo sapiens
  misc_feature 26: n = adenine or guanine
tgaagccttaaggacaactgtagacnttccctcaccgaaaccctagaccag

SEQ ID NO: 295 - DNA, 51 bp, Homo sapiens
  misc_feature 26: n = adenine or guanine
tatgcccccagtaaatatttgttaantgaactaagggagctatcatttact

SEQ ID NO: 296 - DNA, 51 bp, Homo sapiens
  misc_feature 26: n = cytosine or thymine
atgcacagtcactccacatccaccantgaaggaaaggaaaaaagggcagag

SEQ ID NO: 297 - DNA, 51 bp, Homo sapiens
  misc_feature 26: n = adenine or guanine
gccatggtcatctgacagtctctacnctgtgaatattgcctggtgatcaag

SEQ ID NO: 298 - DNA, 51 bp, Homo sapiens
  misc_feature 26: n = adenine or guanine
gagctatttttacctcccgcctcccntgctggtccccccacctgacgtctt

SEQ ID NO: 299 - DNA, 51 bp, Homo sapiens
  misc_feature 26: n = guanine or thymine
gagtccctggggaaagcggggagctnggaggaatccagagaaaagggggcc

SEQ ID NO: 300 - DNA, 51 bp, Homo sapiens
  misc_feature 26: n = cytosine or thymine
cccaggcagaagagctcatgggccangttaaggcgctcagatcccatggtt

SEQ ID NO: 301 - DNA, 51 bp, Homo sapiens
  misc_feature 26: n = cytosine or thymine
atgttgcccaggctcgtcttgaactngagctcaaaatgatctgcttgcctt

SEQ ID NO: 302 - DNA, 51 bp, Homo sapiens
  misc_feature 26: n = adenine or guanine
tcagccccagcttatctcctcctccncgctgtgtaaatgctccagcactca

SEQ ID NO: 303 - DNA, 51 bp, Homo sapiens
  misc_feature 26: n = cytosine or guanine
gcctgtcagcctcagcccagtctgtnttgcttaagggtgcgcctccccagg

SEQ ID NO: 304 - DNA, 51 bp, Homo sapiens
  misc_feature 26: n = cytosine or thymine
agaccaacaacacacaagctcattgncagccccctgccacccactgaccct

SEQ ID NO: 305 - DNA, 51 bp, Homo sapiens
  misc_feature 26: n = adenine or guanine
gggagcgggaaagtgaccactgagcncagggagcaaagcacagggggccag

SEQ ID NO: 306 - DNA, 51 bp, Homo sapiens
  misc_feature 26: n = cytosine or guanine
gtgtaataaaaactacaagaataatntttcaatcacacgatcagaagcaaa

SEQ ID NO: 307 - DNA, 51 bp, Homo sapiens
  misc_feature 26: n = cytosine or thymine
gcagtggctgataaagatttgcccanctccacgacaagggagagtgcttct

SEQ ID NO: 308 - DNA, 51 bp, Homo sapiens
  misc_feature 26: n = adenine or guanine
atacctttaagctggttggcaagttntttcatgtcaccggtgacatagcca

SEQ ID NO: 309 - DNA, 51 bp, Homo sapiens
  misc_feature 26: n = adenine or guanine
gtatgaccagtttggctggaaagaanggattgtaatgtcctgtggctgaaa

SEQ ID NO: 310 - DNA, 51 bp, Homo sapiens
  misc_feature 26: n = adenine or guanine
actcagtctttcagccccatttgagnacatctactttggactctggggttt

SEQ ID NO: 311 - DNA, 51 bp, Homo sapiens
  misc_feature 26: n = cytosine or thymine
agatccctgttctgaagatcgactcnggtccattttagaggcctctggttc

SEQ ID NO: 312 - DNA, 51 bp, Homo sapiens
  misc_feature 26: n = cytosine or thymine
ccaagtgtaagaaaggaataaggatnctagcacgtgcaacataagcgatac

SEQ ID NO: 313 - DNA, 51 bp, Homo sapiens
  misc_feature 26: n = adenine or guanine
acaggtgtcaagggtgagctctgtgncggaaatggcactggggtattatgg

SEQ ID NO: 314 - DNA, 51 bp, Homo sapiens
  misc_feature 26: n = guanine or thymine
gtctctcatatccatgaacgtctctncatcaccactgaagtccaagccacc

SEQ ID NO: 315 - DNA, 51 bp, Homo sapiens
  misc_feature 26: n = cytosine or thymine
cacctccttgatagcccccattcatncatttattgaatgactgtttactac

SEQ ID NO: 316 - DNA, 51 bp, Homo sapiens
  misc_feature 26: n = cytosine or thymine
ggactagagggggaagaactgaaacncagagaaaagttggcacagtgccag

SEQ ID NO: 317 - DNA, 51 bp, Homo sapiens
  misc_feature 26: n = adenine or guanine
tggagactttgtaaaccactaagaancctgggctggggaactgtctagccc

SEQ ID NO: 318 - DNA, 51 bp, Homo sapiens
  misc_feature 26: n = adenine or guanine
tctgataaattcccctggttgtgaancattgtagcgcattcataacagctg

SEQ ID NO: 319 - DNA, 51 bp, Homo sapiens
  misc_feature 26: n = adenine or guanine
ctctgtttggggtctctgacttcccncaacactaaaggtactacagatgat

SEQ ID NO: 320 - DNA, 51 bp, Homo sapiens
  misc_feature 26: n = guanine or thymine
aacctgaattagcatgttagcaagcncagtcccctgaccatgtgatgtgat

SEQ ID NO: 321 - DNA, 51 bp, Homo sapiens
  misc_feature 26: n = adenine or cytosine
tcaatgatgggggcatgcatagctanagaatataggggtgaggccgggtgc

SEQ ID NO: 322 - DNA, 51 bp, Homo sapiens
  misc_feature 26: n = adenine or cytosine
aatggttgctgtggagggggaagaanataggagtagggaatgaagacaaaa

SEQ ID NO: 323 - DNA, 51 bp, Homo sapiens
  misc_feature 26: n = adenine or guanine
cctcaaaggcccagggtcatgtgatnccattaagttgatccaatagcttcc

SEQ ID NO: 324 - DNA, 51 bp, Homo sapiens
  misc_feature 26: n = cytosine or thymine
aggagacgctgtgcctgtgtggccangtgccctctctgggcctctgttttc

SEQ ID NO: 325 - DNA, 51 bp, Homo sapiens
  misc_feature 26: n = adenine or guanine
caccacatcacacccgggtacccacnaggtgaggaccccagcctcctccgt

SEQ ID NO: 326 - DNA, 1550 bp, Homo sapiens
tcaacgcctgcctcccctcgagcgtcctcagcgcagccgccgcccgcggagccagcacgaacgagcccagcaccggccggatggagcgtccgcaacccgacagcatgccccaggatttgtcagaggccctgaaggaggccaccaaggaggtgcacacccaggcagagaatgctgagttcatgaggaactttcagaagggccaggtgacccgagacggcttcaagctggtgatggcctccctgtaccacatctatgtggccctggaggaggagattgagcgcaacaaggagagcccagtcttcgcccctgtctacttcccagaagagctgcaccgcaaggctgccctggagcaggacctggccttctggtacgggccccgctggcaggaggtcatcccctacacaccagccatgcagcgctatgtgaagcggctccacgaggtggggcgcacagagcccgagctgctggtggcccacgcctacacccgctacctgggtgacctgtctgggggccaggtgctcaaaaagattgcccagaaagccctggacctgcccagctctggcgagggcctggccttcttcaccttccccaacattgccagtgccaccaagttcaagcagctctaccgctcccgcatgaactccctggagatgactcccgcagtcaggcagagggtgatagaagaggccaagactgcgttcctgctcaacatccagctctttgaggagttgcaggagctgctgacccatgacaccaaggaccagagcccctcacgggcaccagggcttcgccagcgggccagcaacaaagtgcaagattctgcccccgtggagactcccagagggaagcccccactcaacacccgctcccaggctccgcttctccgatgggtccttacactcagctttctggtggcgacagttgctgtagggctttatgccatgtgaatgcaggcatgctggctcccagggccatgaactttgtccggtggaaggccttctttctagagagggaattctcttggctggcttccttaccgtgggcactgaaggctttcagggcctccagccctctcactgtgtccctctctctggaaaggaggaaggagcctatggcatcttccccaacgaaaagcacatccaggcaatggcctaaacttcagagggggcgaaggggtcagccctgcccttcagcatcctcagttcctgcagcagagcctggaagacaccctaatgtggcagctgtctcaaacctccaaaagccctgagtttcaagtatccttgttgacacggccatgaccactttccccgtgggccatggcaatttttacacaaacctgaaaagatgttgtgtcttgtgtttttgtcttatttttgttggagccactctgttcctggctcagcctcaaatgcagtatttttgttgtgttctgttgtttttatagcagggttggggtggtttttgagccatgcgtgggtggggagggaggtgtttaacggcactgtggccttggtctaacttttgtgtgaaataataaacaacattgtctg

SEQ ID NO: 327 - protein, 288 aa, Homo sapiens
MERPQPDSMPQDLSEALKEATKEVHTQAENAEFMRNFQKGQVTRDGFKLVMASLYHIYVALEEEIERNKESPVFAPVYFPEELHRKAALEQDLAFWYGPRWQEVIPYTPAMQRYVKRLHEVGRTEPELLVAHAYTRYLGDLSGGQVLKKIAQKALDLPSSGEGLAFFTFPNIASATKFKQLYRSRMNSLEMTPAVRQRVIEEAKTAFLLNIQLFEELQELLTHDTKDQSPSRAPGLRQRASNKVQDSAPVETPRGKPPLNTRSQAPLLRWVLTLSFLVATVAVGLYAM

SEQ ID NO: 328 - DNA, 1636 bp, Homo sapiens
gggctgactggaggctggcggacaggcgacagacctgcggcaggaccagaggagcgagacgagcaagaaccacacccagcagcaatgtcagcggaagtggaaacctcagagggggtagacgagtcagaaaaaaagaactctggggccctagaaaaggagaaccaaatgagaatggctgacctctcggagctcctgaaggaagggaccaaggaagcacacgaccgggcagaaaacacccagtttgtcaaggacttcttgaaaggcaacattaagaaggagctgtttaagctggccaccacggcactttacttcacatactcagccctcgaggaggaaatggagcgcaacaaggaccatccagcctttgcccctttgtacttccccatggagctgcaccggaaggaggcgctgaccaaggacatggagtatttctttggtgaaaactgggaggagcaggtgcagtgccccaaggctgcccagaagtacgtggagcggatccactacatagggcagaacgagccggagctactggtggcccatgcatacacccgctacatgggggatctctcggggggccaggtgctgaagaaggtggcccagcgagcactgaaactccccagcacaggggaagggacccagttctacctgtttgagaatgtggacaatgcccagcagttcaagcagctctaccgggccaggatgaacgccctggacctgaacatgaagaccaaagagaggatcgtggaggaggccaacaaggcttttgagtataacatgcagatattcaatgaactggaccaggccggctccacactggccagagagaccttggaggatgggttccctgtacacgatgggaaaggagacatgcgtaaatgccctttctacgctgctgaacaagacaaaggtgccctggagggcagcagctgtcccttccgaacagctatggctgtgctgaggaagcccagcctccagttcatcctggccgctggtgtggccctagctgctggactcttggcctggtactacatgtgaagcacccatcatgccacaccggtaccctcctcccgactgaccactggcctacccctttctccagccctgactaaactaccacctcaggtgactttttaaaaaatgctgggtttaagaaaggcaaccaataaaagagatgctagagcctcgtctgacagcatcctctctatgggccatattccgcactgggcacaggccgtcaccctgggagcagtcggcacagtgcagcaagcctggcccccgacccagctctactccaggcttccacacttctgggccctaggctgcttccggtagtccctgtttttgcagtacatgggtgactatctcccctgttggaggtgagtggcctgtaagtccaagctgtgcgagggggccttgctggatgctgctgtacaacttctgggcctctcttggaccctgggagtgagggtgggtgtgggtggaagcctcagaggccttgggagctcatccctctcacccagaatccctctaacccttgggtgcggtttgctcagccccagcttatctcctcctccgcctgtgtaaatgctccagcactcaataaagtgggctttgcaagctaaaaaaaaaaaaaaaa

SEQ ID NO: 329 - protein, 316 aa, Homo sapiens
MSAEVETSEGVDESEKKNSGALEKENQMRMADLSELLKEGTKEAHDRAENTQFVKDFLKGNIKKELFKLATTALYFTYSALEEEMERNKDHPAFAPLYFPMELHRKEALTKDMEYFFGENWEEQVQCPKAAQKYVERIHYIGQNEPELLVAHAYTRYMGDLSGGQVLKKVAQRALKLPSTGEGTQFYLFENVDNAQQFKQLYRARMNALDLNMKTKERIVEEANKAFEYNMQIFNELDQAGSTLARETLEDGFPVHDGKGDMRKCPFYAAEQDKGALEGSSCPFRTAMAVLRKPSLQFILAAGVALAAGLLAWYYM

SEQ ID NO: 330 - DNA, 1019 bp, Homo sapiens
gagcccctcccctcggcccgcgcgggaggagtgtgacccaggtgccgcttcctctcgccgccgagggtcaggagcccgggagcgcgaccctcccccggcccggcctggcccggcctggccagtccccgcggtctctgcccgggctgacgcccaggaatgtggtcgacgagaagccccaacagcacggcgtggcctctcagcctcgagcctgatccagggatgtctggatggccggatggcagaatggagacctccacccccaccataatggacattgtcgtcattgcaggtgtgattgctgctgtggccatcgtcctagtctccctcctcttcgtcatgctgcgctacatgtaccggcacaagggcacgtaccacaccaatgaggccaagggcacggagtttgctgagagtgcagatgcagccctgcagggagaccctgccctccaagatgctggtgatagcagcagaaaggagtactttatttgagggacaacagacttcacttccctgaatgcctcccccatctccatcaggaaaaatacaccccatcgcccagcacccctgctgataccaccagacagagagagagagcacttgattcttcccgagatagccacctggaaacactaggtgcctgcccagggaggaacggaggaggactcgcgctacaagaggccactcccagggacccagggaggcgatggccaccccagaggccaccttttgctccacggaggtgggagaaaatctgggcacatggggccccctgggcagtgcaggacaacatcagctcactggcaggaaagtccttgttgagggtgagggggtgctggggtacccgggggctggggaagcaaggaaataagtcatctgtatgctgactggggataatggcatcaaatgtcagtccttgacatttggggggaacagcaggtgccagagctaaaaggtacctttgtctgccattgatccagctcagaacgattggaaataaatttgaaatgtaaccgagcaaaaaa

SEQ ID NO: 331 - protein, 65 aa, Homo sapiens
GVIAAVAIVLVSLLFVMLRYMYRHKGTYHTNEAKGTEFAESADAALQGDPALQDAGDSSRKEYFI

SEQ ID NO: 332 - DNA, 1425 bp, Homo sapiens
atcgctccctcaagccctcaagtaggtgttggagagaggggtgatgcctggtgctggtggaacccctgcacagagacggacacaggatgagctctaagtacccgcggtctgtccggcgctgcctgcccctctgggccctaacactggaagcagctctcattctcctcttctatttttttacccactatgacgcttccttagaggatcaaaaggggctcgtggcatcctatcaagttggccaagatctgaccgtgatggcggccattggcttgggcttcctcacctcgagtttccggagacacagctggagcagtgtggccttcaacctcttcatgctggcgcttggtgtgcagtgggcaatcctgctggacggcttcctgagccagttcccttctgggaaggtggtcatcacactgttcagtattcggctggccaccatgagtgctttgtcggtgctgatctcagtggatgctgtcttggggaaggtcaacttggcgcagttggtggtgatggtgctggtggaggtgacagctttaggcaacctgaggatggtcatcagtaatatcttcaacacagactaccacatgaacctgaggcacttctacgtgttcgcagcctattttgggctgactgtggcctggtgcctgccaaagcctctacccaagggaacggaggataatgatcagagagcaacgatacccagtttgtctgccatgctgggcgccctcttcttgtggatgttctggccaagtgtcaactctcctctgctgagaagtccaatccaaaggaagaatgccatgttcaacacctactatgctctagcagtcagtgtggtgacagccatctcagggtcatccttggctcacccccaaaggaagatcagcatgacttatgtgcacagtgcggtgttggcaggaggcgtggctgtgggtacctcgtgtcacctgatcccttctccgtggcttgccatggtgctgggtcttgtggctgggctgatctccatcgggggagccaagtgcctgccggattggcttccaggtcctcctcagcattggggaactcagcttggccatcgtgatagctctcacgtctggtctcctgacaggtttgctcctaaatctcaaaatatggaaagcacctcatgtggctaaatattttgatgaccaagttttctggaagtttcctcatttggctgttggattttaagcaaaagcatccaagaaaaacaaggcctgttcaaaaacaagacaacttcctctcactgttgcctgcatttgtacgtgagaaacgctcatgacagcaaagtctccttatgtataatgaaacaaggtcagagacagatttgatattaaaaaattaaagactaaaaacttagtttaagagtcaatttaataagtttaaaataaatgtttagtttcattagga

SEQ ID NO: 333 - protein, 354 aa, Homo sapiens
MSSKYPRSVRRCLPLWALTLEAALILLFYFFTHYDASLEDQKGLVASYQVGQDLTVMAAIGLGFLTSSFRRHSWSSVAFNLFMLALGVQWAILLDGFLSQFPSGKVVITLFSIRLATMSALSVLISVDAVLGKVNLAQLVVMVLVEVTALGNLRMVISNIFNTDYHMNLRHFYVFAAYFGLTVAWCLPKPLPKGTEDNDQRATIPSLSAMLGALFLWMFWPSVNSPLLRSPIQRKNAMFNTYYALAVSVVTAISGSSLAHPQRKISMTYVHSAVLAGGVAVGTSCHLIPSPWLAMVLGLVAGLISIGGAKCLPDWLPGPPQHWGTQLGHRDSSHVWSPDRFAPKSQNMESTSCG

SEQ ID NO: 334 - DNA, 1106 bp, Homo sapiens
atcgctccctcaagccctcaagtaggtgttggagagaggggtgatgcctggtgctggtggaacccctgcacagagacggacacaggatgagctctaagtacccgcggtctgtccggcgctgcctgcccctctgggccctaacactggaagcagctctcattctcctcttctatttttttacccactatgacgcttccttagaggatcaaaaggggctcgtggcatcctatcaagttggccaagatctgaccgtgatggcggccattggcttgggcttcctcacctcgagtttccggagacacagctggagcagtgtggccttcaacctcttcatgctggcgcttggtgtgcagtgggcaatcctgctggacggcttcctgagccagttcccttctgggaaggtggtcatcacactgttcagtattcggctggccaccatgagtgctttgtcggtgctgatctcagtggatgctgtcttggggaaggtcaacttggcgcagttggtggtgatggtgctggtggaggtgacagctttaggcaacctgaggatggtcatcagtaatatcttcaacgtgtgttgtaaccgagtgctggggattcaccacatctccgtcatgcactccatcttcagcttgctgggtctgcttggagagatcacctacattgtgctgctggtgcttcatactgtctggaacggcaatggcatgattggcttccaggtcctcctcagcattggggaactcagcttggccatcgtgatagctctcacgtctggtctcctgacaggtttgctcctaaatctcaaaatatggaaagcacctcatgtggctaaatattttgatgaccaagttttctggaagtttcctcatttggctgttggattttaagcaaaagcatccaagaaaaacaaggcctgttcaaaaacaagacaacttcctctcactgttgcctgcatttgtacgtgagaaacgctcatgacagcaaagtctccttatgtataatgaaacaaggtcagagacagatttgatattaaaaaattaaagactaaaaacttagtttaagagtcaatttaataagtttaaaataaatgtttagtttcattagga

SEQ ID NO: 335 - protein, 266 aa, Homo sapiens
MSSKYPRSVRRCLPLWALTLEAALILLFYFFTHYDASLEDQKGLVASYQVGQDLTVMAAIGLGFLTSSFRRHSWSSVAFNLFMLALGVQWAILLDGFLSQFPSGKVVITLFSIRLATMSALSVLISVDAVLGKVNLAQLVVMVLVEVTALGNLRMVISNIFNVCCNRVLGIHHISVMHSIFSLLGLLGEITYIVLLVLHTVWNGNGMIGFQVLLSIGELSLAIVIALTSGLLTGLLLNLKIWKAPHVAKYFDDQVFWKFPHLAVGF

SEQ ID NO: 336 - DNA, 1163 bp, Homo sapiens
atcgctccctcaagccctcaagtaggtgttggagagaggggtgatgcctggtgctggtggaacccctgcacagagacggacacaggatgagctctaagtacccgcggtctgtccggcgctgcctgcccctctgggccctaacactggaagcagctctcattctcctcttctatttttttacccactatgacgcttccttagaggatcaaaaggggctcgtggcatcctatcaagttggccaagatctgaccgtgatggcggccattggcttgggcttcctcacctcgagtttccggagacacagctggagcagtgtggccttcaacctcttcatgctggcgcttggtgtgcagtgggcaatcctgctggacggcttcctgagccagttcccttctgggaaggtggtcatcacactgttcagtattcggctggccaccatgagtgctttgtcggtgctgatctcagtggatgctgtcttggggaaggtcaacttggcgcagttggtggtgatggtgctggtggaggtgacagctttaggcaacctgaggatggtcatcagtaatatcttcaacacttatgtgcacagtgcggtgttggcaggaggcgtggctgtgggtacctcgtgtcacctgatcccttctccgtggcttgccatggtgctgggtcttgtggctgggctgatctccatcgggggagccaagtgcctgccggtgtgttgtaaccgagtgctggggattcaccacatctccgtcatgcactccatcttcagcttgctgggtctgcttggagagatcacctacattgtgctgctggtgcttcatactgtctggaacggcaatggcatgattgctcctaaatctcaaaatatggaaagcacctcatgtggctaaatattttgatgaccaagttttctggaagtttcctcatttggctgttggattttaagcaaaagcatccaagaaaaacaaggcctgttcaaaaacaagacaacttcctctcactgttgcctgcatttgtacgtgagaaacgctcatgacagcaaagctccttatgtataatgaaacaaggtcagagacagatttgatattaaaaaattaaagactaaaaacttagtttaagagtcaatttaataagtttaaaataaatgtttagtttcattagga

SEQ ID NO: 337 - protein, 267 aa, Homo sapiens
MSSKYPRSVRRCLPLWALTLEAALILLFYFFTHYDASLEDQKGLVASYQVGQDLTVMAAIGLGFLTSSFRRHSWSSVAFNLFMLALGVQWAILLDGFLSQFPSGKVVITLFSIRLATMSALSVLISVDAVLGKVNLAQLVVMVLVEVTALGNLRMVISNIFNTYVHSAVLAGGVAVGTSCHLIPSPWLAMVLGLVAGLISIGGAKCLPVCCNRVLGIHHISVMHSIFSLLGLLGEITYIVLLVLHTVWNGNGMIAPKSQNMESTSCG

SEQ ID NO: 338 - DNA, 993 bp, Homo sapiens
tgctgcaactcaaactaaccaacccactgggagaagatgcctgggggtccaggagtcctccaagctctgcctgccaccatcttcctcctcttcctgctgtctgctgtctacctgggccctgggtgccaggccctgtggatgcacaaggtcccagcatcattgatggtgagcctgggggaagacgcccacttccaatgcccgcacaatagcagcaacaacgccaacgtcacctggtggcgcgtcctccatggcaactacacgtggccccctgagttcttgggcccgggcgaggaccccaatgagccgccccccaggcccttcctggacatgggggagggcaccaagaaccgaatcatcacagccgaggggatcatcctcctgttctgcgcggtggtgcctgggacgctgctgctgttcaggaaacgatggcagaacgagaagctcgggttggatgccggggatgaatatgaagatgaaaacctttatgaaggcctgaacctggacgactgctccatgtatgaggacatctcccggggcctccagggcacctaccaggatgtgggcagcctcaacataggagatgtccagctggagaagccgtgacacccctactcctgccaggctgcccccgcctgctgtgcacccagctccagtgtctcagctcacttccctgggacattctcctttcagcccttctgggggcttccttagtcatattcccccagtggggggtgggagggtaacctcactcttctccaggccaggcctccttggactcccctgggggtgtcccactcttcttccctctaaactgccccacctcctaacctaatccccacgccccgctgcctttcccaggctcccctcacccagcgggtaatgagcccttaatcgctgcctctaggggagctgattgtagcagcctcgttagtgtcaccccctcctccctgatctgtcagggccacttagtgataataaattcttcccaactgc

SEQ ID NO: 339 - protein, 188 aa, Homo sapiens
MPGGPGVLQALPATIFLLFLLSAVYLGPGCQALWMHKVPASLMVSLGEDAHFQCPHNSSNNANVTWWRVLHGNYTWPPEFLGPGEDPNEPPPRPFLDMGEGTKNRIITAEGIILLFCAVVPGTLLLFRKRWQNEKLGLDAGDEYEDENLYEGLNLDDCSMYEDISRGLQGTYQDVGSLNIGDVQLEKP

SEQ ID NO: 340 - DNA, 958 bp, Homo sapiens
caggggacaggctgcagccggtgcagttacacgttttcctccaaggagcctcggacgttgtcacgggtttggggtcggggacagagcagtgaccatggccaggctggcgttgtctcctgtgcccagccactggatggtggcgttgctgctgctgctctcagctgagccagtaccagcagccagatcggaggaccggtaccggaatcccaaaggattcagcaccttggcacagctgaagcagaggaacacgctgaaggatggtatcatcatgatccagacgctgctgatcatcctcttcatcatcgtgcctatcttcctgctgctggacaaggatgacagcaaggctggcatggaggaagatcacacctacgagggcctggacattgaccagacagccacctatgaggacatagtgacgctgcggacaggggaagtgaagtggtctgtaggtgagcacccaggccaggagtgagagccaggtcgccccatgacctgggtgcaggctccctggcctcagtgactgcttcggagctgcctggctcatggcccaacccctttcctggaccccccagctggcctctgaagctggcccaccagagctgccatttgtctccagcccctggtccccagctcttgccaaagggcctggagtagaaggacaacagggcagcaacttggagggagttctctggggatggacgggacccagccttctgggggtgctatgaggtgatccgtccccacacatgggatgggggaggcagagactggtccagagcccgcaaatggactcggagccgagggcctcccagcagagcttgggaagggccatggacccaactgggccccagaagagccacaggaacatcattcctctcccgcaaccactcccaccccagggaggccctggcctccagtgccttcccccgtggaataaacggtgtgtcctgagaaacca

SEQ ID NO: 341 - protein, 125 aa, Homo sapiens
MARLALSPVPSHWMVALLLLLSAEPVPAARSEDRYRNPKGFSTLAQLKQRNTLKDGIIMIQTLLIILFIIVPIFLLLDKDDSKAGMEEDHTYEGLDIDQTATYEDIVTLRTGEVKWSVGEHPGQE

SEQ ID NO: 342 - DNA, 4050 bp, Homo sapiens
gcgcgtgaacgcagctcggctgccgctggcaggaaacaattctgcaaaaataatcatactcagcctggcaattgtctgcccctaggtctgtcgctcagccgccgtccacactcgctgcagggggggggggcacagaatttaccgcggcaagaacatccctcccagccagcagattacaatgctgcaaactaaggatctcatctggactttgtttttcctgggaactgcagtttctctgcaggtggatattgttcccagccagggggagatcagcgttggagagtccaaattcttcttatgccaagtggcaggagatgccaaagataaagacatctcctggttctcccccaatggagaaaagctcaccccaaaccagcagcggatctcagtggtgtggaatgatgattcctcctccaccctcaccatctataacgccaacatcgacgacgccggcatttacaagtgtgtggttacaggcgaggatggcagtgagtcagaggccaccgtcaacgtgaagatctttcagaagctcatgttcaagaatgcgccaaccccacaggagttccgggagggggaagatgccgtgattgtgtgtgatgtggtcagctccctcccaccaaccatcatctggaaacacaaaggccgagatgtcatcctgaaaaaagatgtccgattcatagtcctgtccaacaactacctgcagatccggggcatcaagaaaacagatgagggcacttatcgctgtgagggcagaatcctggcacggggggagatcaacttcaaggacattcaggtcattgtgaatgtgccacctaccatccaggccaggcagaatattgtgaatgccaccgccaacctcggccagtccgtcaccctggtgtgcgatgccgaaggcttcccagagcccaccatgagctggacaaaggatggggaacagatagagcaagaggaagacgatgagaagtacatcttcagcgacgatagttcccagctgaccatcaaaaaggtggataagaacgacgaggctgagtacatctgcattgctgagaacaaggctggcgagcaggatgcgaccatccacctcaaagtctttgcaaaacccaaaatcacatatgtagagaaccagactgccatggaattagaggagcaggtcactcttacctgtgaagcctccggagaccccattccctccatcacctggaggacttctacccggaacatcagcagcgaagaaaaggcttcgtggactcgaccagagaagcaagagactctggatgggcacatggtggtgcgtagccatgcccgtgtgtcgtcgctgaccctgaagagcatccagtacactgatgccggagagtacatctgcaccgccagcaacaccatcggccaggactcccagtccatgtaccttgaagtgcaatatgccccaaagctacagggccctgtggctgtgtacacttgggaggggaaccaggtgaacatcacctgcgaggtatttgcctatcccagtgccacgatctcatggtttcgggatggccagctgctgccaagctccaattacagcaatatcaagatctacaacaccccctctgccagctatctggaggtgaccccagactctgagaatgattttgggaactacaactgtactgcagtgaaccgcattgggcaggagtccttggaattcatccttgttcaagcagacaccccctcttcaccatccatcgaccaggtggagccatactccagcacagcccaggtgcagtttgatgaaccagaggccacaggtggggtgcccatcctcaaatacaaagctgagtggagagcagtgggtgaagaagtatggcattccaagtggtatgatgccaaggaagccagcatggagggcatcgtcaccatcgtgggcctgaagcccgaaacaacgtacgccgtaaggctggcggcgctcaatggcaaagggctgggtgagatcagcgcggcctccgagttcaagacgcagccagtccaaggggaacccagtgcacctaagctcgaagggcagatgggagaggatggaaactctattaaagtgaacctgatcaagcaggatgacggcggctcccccatcagacactatctggtcaggtaccgagcgctctcctccgagtggaaaccagagatcaggctcccgtctggcagtgaccacgtcatgctgaagtccctggactggaatgctgagtatgaggtctacgtggtggctgagaaccagcaaggaaaatccaaggcggctcattttgtgttcaggacctcggcccagcccacagccatcccagccaacggcagccccacctcaggcctgagcaccggggccatcgtgggcatcctcatcgtcatcttcgtcctgctcctggtggttgtggacatcacctgctacttcctgaacaagtgtggcctgttcatgtgcattgcggtcaacctgtgtggaaaagccgggcccggggccaagggcaaggacatggaggagggcaaggccgccttctcgaaagatgagtccaaggagcccatcgtggaggttcgaacggaggaggagaggaccccaaaccatgatggagggaaacacacagagcccaacgagaccacgccactgacggagcccgagaagggccccgtagaagcaaagccagagtgccaggagacagaaacgaagccagcgccagccgaagtcaagacggtccccaatgacgccacacagacaaaggagaacgagaacaaagcatgatgggtgaagagaaccgagcaaagatcaaaataaaaagtgacacagcagcttcaccagagcatttccaacaccacagacacacacacgcacgcacacacacaaacacacatgcacacacacacatctcatttctctagtgtcttttgcctttaaaaaaaactaaacagataaaacatgggaatctcctttttgtaggtttatagaaagggtccctttgttgcacactcacttgtaagaaaatgagacaaaaaggttaaacccacagccaaactaggacactccgttccctgaaaccgttaaaaaatcaaacaaaaggaccccaaattaagaatctaggaagctcagaaacgaaatctaggttcaggaagaccacacttggtgttacccgattggcacagaccagtttcagagaaatactttcaggcactaagactaatcgaatgaacaaagtccacagtttatttttatactttcagtcaagtttgaactctgtaaaacctcataaataagttataatttctgttcactttgtatttgttcagtatgcaaagtgtgtcaccctttctagctgaattcaattcccacgtagactcttattttataggacgaatgccaaattgcagcttctgggggtagatctcaatttgcagtattcagacttctttttctttcttttacattcttttttctttctttctttctgccaactttgttttccagtgtttacaaggtgacaaatgtttgactttggttgtgtttaaatgtccgtgtaaaatagctgccttttattttttaaggtaacaaataccacctagaggtaggtaggatcatcccacgcttgctttagcacaggacaactttacaaaacatgattgtttacagctgctcttcccctcttttctgatctgcagtttttgcctgggtcccactcaggtgaaaatccatctcattctggaatggttttgcttttgaatttttggttatttttgtgtttctttgggggttagaccactttctgattagccgccacctgcctgcatctgtgaaaagggatctgctcccaggcgttctcacccttcttttgaaggactccttaggctttgttgaatgaagcagagaagattgtatagttggggctggtcttggtgaacacacattattaccccacacatcccctttgtgtagaaagccaaataaaatctatacataccaaaaaaaaaaaaaaaaaaaaaaaaaaaaaaaaaaaaaaaaaaaaaaaaaaaaaaaaaaaaaaaaaaaaaaaaaaaaaaaaaaaa

SEQ ID NO: 343 - protein, 858 aa, Homo sapiens
MLQTKDLIWTLFFLGTAVSLQVDIVPSQGEISVGESKFFLCQVAGDAKDKDISWFSPNGEKLTPNQQRISVVWNDDSSSTLTIYNANIDDAGIYKCVVTGEDGSESEATVNVKIFQKLMFKNAPTPQEFREGEDAVIVCDVVSSLPPTIIWKHKGRDVILKKDVRFIVLSNNYLQIRGIKKTDEGTYRCEGRILARGEINFKDIQVIVNVPPTIQARQNIVNATANLGQSVTLVCDAEGFPEPTMSWTKDGEQIEQEEDDEKYIFSDDSSQLTIKKVDKNDEAEYICIAENKAGEQDATIHLKVFAKPKITYVENQTAMELEEQVTLTCEASGDPIPSITWRTSTRNISSEEKASWTRPEKQETLDGHMVVRSHARVSSLTLKSIQYTDAGEYICTASNTIGQDSQSMYLEVQYAPKLQGPVAVYTWEGNQVNITCEVFAYPSATISWFRDGQLLPSSNYSNIKIYNTPSASYLEVTPDSENDFGNYNCTAVNRIGQESLEFILVQADTPSSPSIDQVEPYSSTAQVQFDEPEATGGVPILKYKAEWRAVGEEVWHSKWYDAKEASMEGIVTIVGLKPETTYAVRLAALNGKGLGEISAASEFKTQPVQGEPSAPKLEGQMGEDGNSIKVNLIKQDDGGSPIRHYLVRYRALSSEWKPEIRLPSGSDHVMLKSLDWNAEYEVYVVAENQQGKSKAAHFVFRTSAQPTAIPANGSPTSGLSTGAIVGILIVIFVLLLVVVDITCYFLNKCGLFMCIAVNLCGKAGPGAKGKDMEEGKAAFSKDESKEPIVEVRTEEERTPNHDGGKHTEPNETTPLTEPEKGPVEAKPECQETETKPAPAEVKTVPNDATQTKENENKA

SEQ ID NO: 344 - DNA, 1271 bp, Homo sapiens
ctgtattgtggttcctggaacactttagaggcttgtgattctactgcttcttattcacactataatacatgtctcaccaatagatgattcaagaacatcatttaaatacacaatttttcattctctatttttgctaaatttcttcatactcaactttcagattctttaatctccagctcagcttcaacaattcaacgctgttctttctgaaaaagtacacatcgtgccttctctacttcgctcttggaacataatttctcatggcagcttttactaaactgagtattgagccagcatttactccaggacccaacatagaactccagaaagactctgactgctgttcttgccaagaaaaatgggttgggtaccggtgcaactgttacttcatttccagtgaacagaaaacttggaacgaaagtcggcatctctgtgcttctcagaaatccagcctgcttcagcttcaaaacacagatgaactggattttatgagctccagtcaacaattttactggattggactctcttacagtgaggagcacaccgcctggttgtgggagaatggctctgcactctcccagtatctatttccatcatttgaaacttttaatacaaagaactgcatagcgtataatccaaatggaaatgctttagatgaatcctgtgaagataaaaatcgttatatctgtaagcaacagctcatttaaatgtttcttggggcagagaaggtggagagtaaagacccaacattactaacaatgatacagttgcatgttatattattactaattgtctacttctggagtctataaaatgtttttaaacagtgtcatatacaattgtcatgtatgtgaaacaatgtgttttaaaattgatgaaattcgttcacctacatttgagaattataaaattaacataaagaattttgtattttcatttaatgtatataatgttaaattcaatgtagttttattacacatttatgtaattttatttacattcttgctaattctcagcagaaatttaaataagatttaattcacatcaaataaaatttagaaaataaaatttaactcacactgcccaggctggagcatagtggcaagatcatagctcattgcaagctcaagtgatcctcctgactcagcctcccaagtagctaggactgcaggcaccatgtcactatgcccgactaatttttaatttttaattttttgtcaagacaaggtcttgctatgttgcccaggctggtcttgaactcctggcctcaa

SEQ ID NO: 345 - protein, 148 aa, Homo sapiens
MAAFTKLSIEPAFTPGPNIELQKDSDCCSCQEKWVGYRCNCYFISSEQKTWNESRHLCASQKSSLLQLQNTDELDFMSSSQQFYWIGLSYSEEHTAWLWENGSALSQYLFPSFETFNTKNCIAYNPNGNALDESCEDKNRYICKQQLI

SEQ ID NO: 346 - DNA, 1969 bp, Homo sapiens
gactccgggtggcaggcgcccgggggaatcccagctgactcgctcactgccttcgaagtccggcgccccccgggagggaactgggtggccgcaccctcccggctgcggtggctgtcgccccccaccctgcagccaggactcgatggaggtacagagctcggcttctttgccttgggaggggagtggtggtggttgaaagggcgatggaattttccccgaaagcctacgcccagggcccctcccagctccagcgttaccctccggtctatcctactggccgagctgccccgccttctcatggggaaaacttagccgcaacttcaatttttggtttttcctttaatgacacttctgaggctctcctagccatcctcccgcttccggaggagcgcagatcgcaggtccctttgcccctggcgtgcgactccctactgcgctgcgctcttacggcgttccaggctgctggctagcgcaaggcgggccgggcaccccgcgctccgctgggagggtgagggacgcgcgtctggcggccccagccaagctgcgggtttctgagaagacgctgtcccgcagccctgagggctgagttctgcacccagtcaagctcaggaaggccaagaaaagaatccattccaatatatggccatgtggctctttggagcaatgttccatcatgttccatgctgctgacgtcacatggagcacagaaatcaatgttagcagatagccagcccatacaagatcgtattgtattgtaggaggcatcgtggatggatggctgctggaaaccccttgccatagccagctcttcttcaatacttaaggatttaccgtggctttgagtaatgagaatttcgaaaccacatttgagaagtatttccatccagtgctacttgtgtttacttctaaacagtcattttctaactgaagctggcattcatgtcttcattttgggctgtttcagtgcagggcttcctaaaacagaagccaactgggtgaatgtaataagtgatttgaaaaaaattgaagatcttattcaatctatgcatattgatgctactttatatacggaaagtgatgttcaccccagttgcaaagtaacagcaatgaagtgctttctcttggagttacaagttatttcacttgagtccggagatgcaagtattcatgatacagtagaaaatctgatcatcctagcaaacaacagtttgtcttctaatgggaatgtaacagaatctggatgcaaagaatgtgaggaactggaggaaaaaaatattaaagaatttttgcagagttttgtacatattgtccaaatgttcatcaacacttcttgattgcaattgattctttttaaagtgtttctgttattaacaaacatcactctgctgcttagacataacaaaacactcggcatttcaaatgtgctgtcaaaacaagtttttctgtcaagaagatgatcagaccttggatcagatgaactcttagaaatgaaggcagaaaaatgtcattgagtaatatagtgactatgaacttctctcagacttactttactcatttttttaatttattattgaaattgtacatatttgtggaataatgtaaaatgttgaataaaaatatgtacaagtgttgttttttaagttgcactgatattttacctcttattgcaaaatagcatttgtttaagggtgatagtcaaattatgtattggtggggctgggtaccaatgctgcaggtcaacagctatgctggtaggctcctgccagtgtggaaccactgactactggctctcattgacttccttactaagcatagcaaacagaggaagaatttgttatcagtaagaaaaagaagaactatatgtgaatcctcttctttatactgtaatttagttattgatgtataaagcaactgttatgaaataaagaaattgcaataactggcaaaaaaaaaaaaaaaaaaaaaaaaa

SEQ ID NO: 347 - protein, 162 aa, Homo sapiens; identical to SEQ ID NO: 143

SEQ ID NO: 348 - DNA, 1561 bp, Homo sapiens
aaatcctggctgtcatgtacttgctatgggcctagagtagcttacctaaatgctactaaccttcctccataccattattgtaaagattaaaggtgatgcatctgttaagtaactaatagagtgcttattaaaaggtaggtgttcaataagtattaattccctccctttctttttcttactagtgcacttgtgtttttaatggatcatactttaccctagattgtattgtaggaggcatcgtggatggatggctgctggaaaccccttgccatagccagctcttcttcaatacttaaggatttaccgtggctttgagtaatgagaatttcgaaaccacatttgagaagtatttccatccagtgctacttgtgtttacttctaaacagtcattttctaactgaagctggcattcatgtcttcattttgggatgcagctaatatacccagttggcccaaagcacctaacctatagttatataatctgactctcagttcagttttactctactaatgccttcatggtattgggaaccatagatttgtgcagctgtttcagtgcagggcttcctaaaacagaagccaactgggtgaatgtaataagtgatttgaaaaaaattgaagatcttattcaatctatgcatattgatgctactttatatacggaaagtgatgttcaccccagttgcaaagtaacagcaatgaagtgctttctcttggagttacaagttatttcacttgagtccggagatgcaagtattcatgatacagtagaaaatctgatcatcctagcaaacaacagtttgtcttctaatgggaatgtaacagaatctggatgcaaagaatgtgaggaactggaggaaaaaaatattaaagaatttttgcagagttttgtacatattgtccaaatgttcatcaacacttcttgattgcaattgattctttttaaagtgtttctgttattaacaaacatcactctgctgcttagacataacaaaacactcggcatttcaaatgtgctgtcaaaacaagtttttctgtcaagaagatgatcagaccttggatcagatgaactcttagaaatgaaggcagaaaaatgtcattgagtaatatagtgactatgaacttctctcagacttactttactcatttttttaatttattattgaaattgtacatatttgtggaataatgtaaaatgttgaataaaaatatgtacaagtgttgttttttaagttgcactgatattttacctcttattgcaaaatagcatttgtttaagggtgatagtcaaattatgtattggtggggctgggtaccaatgctgcaggtcaacagctatgctggtaggctcctgccagtgtggaaccactgactactggctctcattgacttccttactaagcatagcaaacagaggaagaatttgttatcagtaagaaaaagaagaactatatgtgaatcctcttctttatactgtaatttagttattgatgtataaagcaactgttatgaaataaagaaattgcaataactggcaaaaaaaaaaaaaaaaaaaaaaaaa

SEQ ID NO: 349 - protein, 135 aa, Homo sapiens
MVLGTIDLCSCFSAGLPKTEANWVNVISDLKKIEDLIQSMHIDATLYTESDVHPSCKVTAMKCFLLELQVISLESGDASIHDTVENLIILANNSLSSNGNVTESGCKECEELEEKNIKEFLQSFVHIVQMFINTS

SEQ ID NO: 350 - DNA, 853 bp, Homo sapiens
cctgggccctcctgctccttgcagccatgctcctgggcaacccagcccctgcctccgcatctgcgtggtgaaggccattggcctcatcggtggatctgcgtttcctcgggcccacactgtctaggattgtgcggggctggtgagagaacaagatctcttccgtgttcaaggcagacttcctgccccctgcaccctgctctctcccgggccttgaggtcagtgtgagccccaagggcaagaacacttctggaagggagagtggatttggctgggcctctggatggaaggtctggtcttctctcgtctgagccctgagtactacgacccggcaagagcccacctgcgtgatggggagaaatcctgcccgtgcgggcaggagggcccccagggtgacctgttgaccaaaacacaggagctgggccgtgactacaggacctgtctgacgatagtccaaaaactgaagaagatggtggataagcccacccagagaagtgtttccaatgctgcgacccgggtgtgtaggacggggaggtcacgatggcgcgacgtctgcagaaatttcatgaggaggtatcagtctagagttatccaaggcctcgtggccggagaaactgcccagcagatctgtgaggacctcaggttgtgtataccttctacaggtcccctctgagccctctcaccttgtcctgtggaagaagcacaggctcctgtcctcagatcccgggaacgtcagcaacctctgccggctcctcgcttcctcgatccagaatccactctccagtctccctcccctgactccctctgctgtcctcccctctcaggggaataaagtgtcaagcaagattttagccgc

SEQ ID NO: 351 - protein, 129 aa, Homo sapiens
MEGLVFSRLSPEYYDPARAHLRDGEKSCPCGQEGPQGDLLTKTQELGRDYRTCLTIVQKLKKMVDKPTQRSVSNAATRVCRTGRSRWRDVCRNFMRRYQSRVIQGLVAGETAQQICEDLRLCIPSTGPL

SEQ ID NO: 352 - DNA, 873 bp, Homo sapiens
ttctatgcaaagcaaaaagccagcagcagccccaagctgataagattaatctaaagagcaaattatggtgtaatttcctatgctgaaactttgtagttaattttttaaaaaggtttcattttcctattggtctgatttcacaggaacattttacctgtttgtgaggcattttttctcctggaagagaggtgctgattggccccaagtgactgacaatctggtgtaacgaaaatttccaatgtaaactcattttccctcggtttcagcaattttaaatctatatatagagatatctttgtcagcattgcatcgttagcttctcctgataaactaattgcctcacattgtcactgcaaatcgacacctattaatgggtctcacctcccaactgcttccccctctgttcttcctgctagcatgtgccggcaactttgtccacggacacaagtgcgatatcaccttacaggagatcatcaaaactttgaacagcctcacagagcagaagaacacaactgagaaggaaaccttctgcagggctgcgactgtgctccggcagttctacagccaccatgagaaggacactcgctgcctgggtgcgactgcacagcagttccacaggcacaagcagctgatccgattcctgaaacggctcgacaggaacctctggggcctggcgggcttgaattcctgtcctgtgaaggaagccaaccagagtacgttggaaaacttcttggaaaggctaaagacgatcatgagagagaaatattcaaagtgttcgagctgaatattttaatttatgagtttttgatagctttattttttaagtatttatatatttataactcatcataaaataaagtatatatagaatct

SEQ ID NO: 353 - protein, 137 aa, Homo sapiens
MGLTSQLLPPLFFLLACAGNFVHGHKCDITLQEIIKTLNSLTEQKNTTEKETFCRAATVLRQFYSHHEKDTRCLGATAQQFHRHKQLIRFLKRLDRNLWGLAGLNSCPVKEANQSTLENFLERLKTIMREKYSKCSS

SEQ ID NO: 354 - DNA, 2347 bp, Homo sapiens
ctgtttcagggccattggactctccgtcctgcccagagcaagatgtgtcaccagcagttggtcatctcttggttttccctggtttttctggcatctcccctcgtggccatatgggaactgaagaaagatgtttatgtcgtagaattggattggtatccggatgcccctggagaaatggtggtcctcacctgtgacacccctgaagaagatggtatcacctggaccttggaccagagcagtgaggtcttaggctctggcaaaaccctgaccatccaagtcaaagagtttggagatgctggccagtacacctgtcacaaaggaggcgaggttctaagccattcgctcctgctgcttcacaaaaaggaagatggaatttggtccactgatattttaaaggaccagaaagaacccaaaaataagacctttctaagatgcgaggccaagaattattctggacgtttcacctgctggtggctgacgacaatcagtactgatttgacattcagtgtcaaaagcagcagaggctcttctgacccccaaggggtgacgtgcggagctgctacactctctgcagagagagtcagaggggacaacaaggagtatgagtactcagtggagtgccaggaggacagtgcctgcccagctgctgaggagagtctgcccattgaggtcatggtggatgccgttcacaagctcaagtatgaaaactacaccagcagcttcttcatcagggacatcatcaaacctgacccacccaagaacttgcagctgaagccattaaagaattctcggcaggtggaggtcagctgggagtaccctgacacctggagtactccacattcctacttctccctgacattctgcgttcaggtccagggcaagagcaagagagaaaagaaagatagagtcttcacggacaagacctcagccacggtcatctgccgcaaaaatgccagcattagcgtgcgggcccaggaccgctactatagctcatcttggagcgaatgggcatctgtgccctgcagttaggttctgatccaggatgaaaatttggaggaaaagtggaagatattaagcaaaatgtttaaagacacaacggaatagacccaaaaagataatttctatctgatttgctttaaaacgtttttttaggatcacaatgatatctttgctgtatttgtatagttagatgctaaatgctcattgaaacaatcagctaatttatgtatagattttccagctctcaagttgccatgggccttcatgctatttaaatatttaagtaatttatgtatttattagtatattactgttatttaacgtttgtctgccaggatgtatggaatgtttcatactcttatgacctgatccatcaggatcagtccctattatgcaaaatgtgaatttaattttatttgtactgacaacttttcaagcaaggctgcaagtacatcagttttatgacaatcaggaagaatgcagtgttctgataccagtgccatcatacacttgtgatggatgggaacgcaagagatacttacatggaaacctgacaatgcaaacctgttgagaagatccaggagaacaagatgctagttcccatgtctgtgaagacttcctggagatggtgttgataaagcaatttagggccacttacacttctaagcaagtttaatctttggatgcctgaattttaaaagggctagaaaaaaatgattgaccagcctgggaaacataacaagaccccgtctctacaaaaaaaatttaaaattagccaggcgtggtggctcatgcttgtggtcccagctgttcaggaggatgaggcaggaggatctcttgagcccaggaggtcaaggctatggtgagccgtgattgtgccactgcataccagcctaggtgacagaatgagaccctgtctcaaaaaaaaaaatgattgaaattaaaattcagctttagcttccatggcagtcctcacccccacctctctaaaagacacaggaggatgacacagaaacaccgtaagtgtctggaaggcaaaaagatcttaagattcaagagagaggacaagtagttatggctaaggacatgaaattgtcagaatggcaggtggcttcttaacagccctgtgagaagcagacagatgcaaagaaaatctggaatccctttctcattagcatgaatgaacctgatacacaattatgaccagaaaatatggctccatgaaggtgctacttttaagtaatgtatgtgcgctctgtaaagtgattacatttgtttcctgtttgtttatttatttatttatttttgcattctgaggctgaactaataaaaactcttctttgtaatc

SEQ ID NO: 355 - protein, 328 aa, Homo sapiens
MCHQQLVISWFSLVFLASPLVAIWELKKDVYVVELDWYPDAPGEMVVLTCDTPEEDGITWTLDQSSEVLGSGKTLTIQVKEFGDAGQYTCHKGGEVLSHSLLLLHKKEDGIWSTDILKDQKEPKNKTFLRCEAKNYSGRFTCWWLTTISTDLTFSVKSSRGSSDPQGVTCGAATLSAERVRGDNKEYEYSVECQEDSACPAAEESLPIEVMVDAVHKLKYENYTSSFFIRDIIKPDPPKNLQLKPLKNSRQVEVSWEYPDTWSTPHSYFSLTFCVQVQGKSKREKKDRVFTDKTSATVICRKNASISVRAQDRYYSSSWSEWASVPCS

SEQ ID NO: 356 - DNA, 2843 bp, Homo sapiens
cgcggtatctgcatcgggcctcactggcttcaggagctgaataccctcccaggcacacacaggtgggacacaaataagggttttggaaccactattttctcatcacgacagcaacttaaaatgcctgggaagatggtcgtgatccttggagcctcaaatatactttggataatgtttgcagcttctcaagcttttaaaatcgagaccaccccagaatctagatatcttgctcagattggtgactccgtctcattgacttgcagcaccacaggctgtgagtccccatttttctcttggagaacccagatagatagtccactgaatgggaaggtgacgaatgaggggaccacatctacgctgacaatgaatcctgttagttttgggaacgaacactcttacctgtgcacagcaacttgtgaatctaggaaattggaaaaaggaatccaggtggagatctactcttttcctaaggatccagagattcatttgagtggccctctggaggctgggaagccgatcacagtcaagtgttcagttgctgatgtatacccatttgacaggctggagatagacttactgaaaggagatcatctcatgaagagtcaggaatttctggaggatgcagacaggaagtccctggaaaccaagagtttggaagtaacctttactcctgtcattgaggatattggaaaagttcttgtttgccgagctaaattacacattgatgaaatggattctgtgcccacagtaaggcaggctgtaaaagaattgcaagtctacatatcacccaagaatacagttatttctgtgaatccatccacaaagctgcaagaaggtggctctgtgaccatgacctgttccagcgagggtctaccagctccagagattttctggagtaagaaattagataatgggaatctacagcacctttctggaaatgcaactctcaccttaattgctatgaggatggaagattctggaatttatgtgtgtgaaggagttaatttgattgggaaaaacagaaaagaggtggaattaattgttcaagcattccctagagatccagaaatcgagatgagtggtggcctcgtgaatgggagctctgtcactgtaagctgcaaggttcctagcgtgtacccccttgaccggctggagattgaattacttaagggggagactattctggagaatatagagtttttggaggatacggatatgaaatctctagagaacaaaagtttggaaatgaccttcatccctaccattgaagatactggaaaagctcttgtttgtcaggctaagttacatattgatgacatggaattcgaacccaaacaaaggcagagtacgcaaacactttatgtcaatgttgcccccagagatacaaccgtcttggtcagcccttcctccatcctggaggaaggcagttctgtgaatatgacatgcttgagccagggctttcctgctccgaaaatcctgtggagcaggcagctccctaacggggagctacagcctctttctgagaatgcaactctcaccttaatttctacaaaaatggaagattctggggtttatttatgtgaaggaattaaccaggctggaagaagcagaaaggaagtggaattaattatccaagttactccaaaagacataaaacttacagcttttccttctgagagtgtcaaagaaggagacactgtcatcatctcttgtacatgtggaaatgttccagaaacatggataatcctgaagaaaaaagcggagacaggagacacagtactaaaatctatagatggcgcctataccatccgaaaggcccagttgaaggatgcgggagtatatgaatgtgaatctaaaaacaaagttggctcacaattaagaagtttaacacttgatgttcaaggaagagaaaacaacaaagactatttttctcctgagcttctcgtgctctattttgcatcctccttaataatacctgccattggaatgataatttactttgcaagaaaagccaacatgaaggggtcatatagtcttgtagaagcacagaaatcaaaagtgtagctaatgcttgatatgttcaactggagacactatttatctgtgcaaatccttgatactgctcatcattccttgagaaaaacaatgagctgagaggcagacttccctgaatgtattgaacttggaaagaaatgcccatctatgtcccttgctgtgagcaagaagtcaaagtaaaacttgctgcctgaagaacagtaactgccatcaagatgagagaactggaggagttccttgatctgtatatacaataacataatttgtacatatgtaaaataaaattatgccatagcaagattgcttaaaatagcaacactctatatttagattgttaaaataactagtgttgcttggactattataatttaatgcatgttaggaaaatttcacattaatatttgctgacagctgacctttgtcatctttcttctattttattccctttcacaaaattttattcctatatagtttattgacaataatttcaggttttgtaaagatgccgggttttatatttttatagacaaataataagcaaagggagcactgggttgactttcaggtactaaatacctcaacctatggtataatggttgactgggtttctctgtatagtactggcatggtacggagatgtttcacgaagtttgttcatcagactcctgtgcaactttcccaatgtggcctaaaaatgcaacttctttttattttcttttgtaaatgtttaggtttttttgtatagtaaagtgataatttctggaattagaaaaaaaaaaaaaaaaaaa

SEQ ID NO: 357 - protein, 647 aa, Homo sapiens
MPGKMVVILGASNILWIMFAASQAFKIETTPESRYLAQIGDSVSLTCSTTGCESPFFSWRTQIDSPLNGKVTNEGTTSTLTMNPVSFGNEHSYLCTATCESRKLEKGIQVEIYSFPKDPEIHLSGPLEAGKPITVKCSVADVYPFDRLEIDLLKGDHLMKSQEFLEDADRKSLETKSLEVTFTPVIEDIGKVLVCRAKLHIDEMDSVPTVRQAVKELQVYISPKNTVISVNPSTKLQEGGSVTMTCSSEGLPAPEIFWSKKLDNGNLQHLSGNATLTLIAMRMEDSGIYVCEGVNLIGKNRKEVELIVQAFPRDPEIEMSGGLVNGSSVTVSCKVPSVYPLDRLEIELLKGETILENIEFLEDTDMKSLENKSLEMTFIPTIEDTGKALVCQAKLHIDDMEFEPKQRQSTQTLYVNVAPRDTTVLVSPSSILEEGSSVNMTCLSQGFPAPKILWSRQLPNGELQPLSENATLTLISTKMEDSGVYLCEGINQAGRSRKEVELIIQVTPKDIKLTAFPSESVKEGDTVIISCTCGNVPETWIILKKKAETGDTVLKSIDGAYTIRKAQLKDAGVYECESKNKVGSQLRSLTLDVQGRENNKDYFSPELLVLYFASSLIIPAIGMIIYFARKANMKGSYSLVEAQKSKV

SEQ ID NO: 358 - DNA, 4689 bp, Homo sapiens
aaccacgatgtctttggcacagcctctcatctgtcagatgggagcggggaccccggagagggagtcagccgaggtcctggcattccttgtgaacccccgtctgtgggtttctggtccagtgtcccttctccagattagatggcttaggcctcctctaagggggtgggcgtgcacatccggagagctgtctggtgtgcaggactgggctgcaggttaccctgaactgcaaccatcttagagcaaggcccagcttgcagcaggaggagctgcaggccgcccaccctagccacggcccctgccctggcaggaagcttccaagagtaaacactgcctaatcgtcccgcccagtagtgagcaggcctgtcccattccatactgaccagattcccagtcaccaaggccccctctcactccgctccactcctcgggctggctctcctgaggatgcaccagcgtcacccccgggcaagatgccctcccctctgtgtggccggaatccttgcctgtggctttctcctgggctgctggggaccctcccatttccagcagagttgtcttcaggctttggagccacaggccgtgtcttcttacttgagccctggtgctcccttaaaaggccgccctccttcccctggcttccagaggcagaggcagaggcagaggcgggctgcaggcggcatcctacacctggagctgctggtggccgtgggccccgatgtcttccaggctcaccaggaggacacagagcgctatgtgctcaccaacctcaacatcggggcagaactgcttcgggacccgtccctgggggctcagtttcgggtgcacctggtgaagatggtcattctgacagagcctgagggtgccccaaatatcacagccaacctcacctcgtccctgctgagcgtctgtgggtggagccagaccatcaaccctgaggacgacacggatcctggccatgctgacctggtcctctatatcactaggtttgacctggagttgcctgatggtaaccggcaggtgcggggcgtcacccagctgggcggtgcctgctccccaacctggagctgcctcattaccgaggacactggcttcgacctgggagtcaccattgcccatgagattgggcacagcttcggcctggagcacgacggcgcgcccggcagcggctgcggccccagcggacacgtgatggcttcggacggcgccgcgccccgcgccggcctcgcctggtccccctgcagccgccggcagctgctgagcctgctcagcgccaacgagcagtgccgcgtggccttcggccccaaggctgtcgcctgcaccttcgccagggagcacctggatatgtgccaggccctctcctgccacacagacccgctggaccaaagcagctgcagccgcctcctcgttcctctcctggatgggacagaatgtggcgtggagaagtggtgctccaagggtcgctgccgctccctggtggagctgacccccatagcagcagtgcatgggcgctggtctagctggggtccccgaagtccttgctcccgctcctgcggaggaggtgtggtcaccaggaggcggcagtgcaacaaccccagacctgcctttggggggcgtgcatgtgttggtgctgacctccaggccgagatgtgcaacactcaggcctgcgagaagacccagctggagttcatgtcgcaacagtgcgccaggaccgacggccagccgctgcgctcctcccctggcggcgcctccttctaccactggggtgctgctgtaccacacagccaaggggatgctctgtgcagacacatgtgccgggccattggcgagagcttcatcatgaagcgtggagacagcttcctcgatgggacccggtgtatgccaagtggcccccgggaggacgggaccctgagcctgtgtgtgtcgggcagctgcaggacatttggctgtgatggtaggatggactcccagcaggtatgggacaggtgccaggtgtgtggtggggacaacagcacgtgcagcccacggaagggctctttcacagctggcagagcgagagaatatgtcacatttctgacagttacccccaacctgaccagtgtctacattgccaaccacaggcctctcttcacacacttggcggtgaggatcggagggcgctatgtcgtggctgggaagatgagcatctcccctaacaccacctacccctccctcctggaggatggtcgtgtcgagtacagagtggccctcaccgaggaccggctgccccgcctggaggagatccgcatctggggacccctccaggaagatgctgacatccaggtttacaggcggtatggcgaggagtatggcaacctcacccgcccagacatcaccttcacctacttccagcctaagccacggcaggcctgggtgtgggccgctgtgcgtgggccctgctcggtgagctgtggggcagggctgcgctgggtaaactacagctgcctggaccaggccaggaaggagttggtggagactgtccagtgccaagggagccagcagccaccagcgtggccagaggcctgcgtgctcgaaccctgccctccctactgggcggtgggagacttcggcccatgcagcgcctcctgtgggggcggcctgcgggagcggccagtgcgctgcgtggaggcccagggcagcctcctgaagacattgcccccagcccggtgcagagcaggggcccagcagccagctgtggcgctggaaacctgcaacccccagccctgccctgccaggtgggaggtgtcagagcccagctcatgcacatcagctggtggagcaggcctggccttggagaacgagacctgtgtgccaggggcagatggcctggaggctccagtgactgaggggcctggctccgtagatgagaagctgcctgcccctgagccctgtgtcgggatgtcatgtcctccaggctggggccatctggatgccacctctgcaggggagaaggctccctccccatggggcagcatcaggacgggggctcaagctgcacacgtgtggacccctgcggcagggtcgtgctccgtctcctgcgggcgaggtctgatggagctgcgtttcctgtgcatggactctgccctcagggtgcctgtccaggaagagctgtgtggcctggcaagcaagcctgggagccggcgggaggtctgccaggctgtcccgtgccctgctcggtggcagtacaagctggcggcctgcagcgtgagctgtgggagaggggtcgtgcggaggatcctgtattgtgcccgggcccatggggaggacgatggtgaggagatcctgttggacacccagtgccaggggctgcctcgcccggaaccccaggaggcctgcagcctggagccctgcccacctaggtggaaagtcatgtcccttggcccatgttcggccagctgtggccttggcactgctagacgctcggtggcctgtgtgcagctcgaccaaggccaggacgtggaggtggacgaggcggcctgtgcggcgctggtgcggcccgaggccagtgtcccctgtctcattgccgactgcacctaccgctggcatgttggcacctggatggagtgctctgtttcctgtggggatggcatccagcgccggcgtgacacctgcctcggaccccaggcccaggcgcctgtgccagctgatttctgccagcacttgcccaagccggtgactgtgcgtggctgctgggctgggccctgtgtgggacagggtgcctgtggcaggcagcaccttgagccaacaggaaccattgacatgcgaggcccagggcaggcagactgtgcagtggccattgggcggcccctcggggaggtggtgaccctccgcgtccttgagagttctctcaactgcagtgcgggggacatgttgctgctttggggccggctcacctggaggaagatgtgcaggaagctgttggacatgactttcagctccaagaccaacacgctggtggtgaggcagcgctgcgggcggccaggaggtggggtgctgctgcggtatgggagccagcttgctcctgaaaccttctacagagaatgtgacatgcagctctttgggccctggggtgaaatcgtgagcccctcgctgagtccagccacgagtaatgcagggggctgccggctcttcattaatgtggctccgcacgcacggattgccatccatgccctggccaccaacatgggcgctgggaccgagggagccaatgccagctacatcttgatccgggacacccacagcttgaggaccacagcgttccatgggcagcaggtgctctactgggagtcagagagcagccaggctgagatggagttcagcgagggcttcctgaaggctcaggccagcctgcggggccagtactggaccctccaatcatgggtaccggagatgcaggaccctcagtcctggaagggaaaggaaggaacctgagggtcattgaacatttgttccgtgtctggccagccctggagggttgacccctggtctcagtgctttccaattcgaactttttccaatcttaggtatctactttagagtcttctccaatgtccaaaaggctagggggttggaggtggggactctggaaaagcagcccccatttcctcgggtaccaataaataaaacatgcaggctgaaaaaaaaaaaaaaaaa

SEQ ID NO: 359 - protein, 1340 aa, Homo sapiens
MHQRHPRARCPPLCVAGILACGFLLGCWGPSHFQQSCLQALEPQAVSSYLSPGAPLKGRPPSPGFQRQRQRQRRAAGGILHLELLVAVGPDVFQAHQEDTERYVLTNLNIGAELLRDPSLGAQFRVHLVKMVILTEPEGAPNITANLTSSLLSVCGWSQTINPEDDTDPGHADLVLYITRFDLELPDGNRQVRGVTQLGGACSPTWSCLITEDTGFDLGVTIAHEIGHSFGLEHDGAPGSGCGPSGHVMASDGAAPRAGLAWSPCSRRQLLSLLSANEQCRVAFGPKAVACTFAREHLDMCQALSCHTDPLDQSSCSRLLVPLLDGTECGVEKWCSKGRCRSLVELTPIAAVHGRWSSWGPRSPCSRSCGGGVVTRRRQCNNPRPAFGGRACVGADLQAEMCNTQACEKTQLEFMSQQCARTDGQPLRSSPGGASFYHWGAAVPHSQGDALCRHMCRAIGESFIMKRGDSFLDGTRCMPSGPREDGTLSLCVSGSCRTFGCDGRMDSQQVWDRCQVCGGDNSTCSPRKGSFTAGRAREYVTFLTVTPNLTSVYIANHRPLFTHLAVRIGGRYVVAGKMSISPNTTYPSLLEDGRVEYRVALTEDRLPRLEEIRIWGPLQEDADIQVYRRYGEEYGNLTRPDITFTYFQPKPRQAWVWAAVRGPCSVSCGAGLRWVNYSCLDQARKELVETVQCQGSQQPPAWPEACVLEPCPPYWAVGDFGPCSASCGGGLRERPVRCVEAQGSLLKTLPPARCRAGAQQPAVALETCNPQPCPARWEVSEPSSCTSAGGAGLALENETCVPGADGLEAPVTEGPGSVDEKLPAPEPCVGMSCPPGWGHLDATSAGEKAPSPWGSIRTGAQAAHVWTPAAGSCSVSCGRGLMELRFLCMDSALRVPVQEELCGLASKPGSRREVCQAVPCPARWQYKLAACSVSCGRGVVRRILYCARAHGEDDGEEILLDTQCQGLPRPEPQEACSLEPCPPRWKVMSLGPCSASCGLGTARRSVACVQLDQGQDVEVDEAACAALVRPEASVPCLIADCTYRWHVGTWMECSVSCGDGIQRRRDTCLGPQAQAPVPADFCQHLPKPVTVRGCWAGPCVGQGACGRQHLEPTGTIDMRGPGQADCAVAIGRPLGEVVTLRVLESSLNCSAGDMLLLWGRLTWRKMCRKLLDMTFSSKTNTLVVRQRCGRPGGGVLLRYGSQLAPETFYRECDMQLFGPWGEIVSPSLSPATSNAGGCRLFINVAPHARIAIHALATNMGAGTEGANASYILIRDTHSLRTTAFHGQQVLYWESESSQAEMEFSEGFLKAQASLRGQYWTLQSWVPEMQDPQSWKGKEGT

SEQ ID NO: 360 - DNA, 4782 bp, Homo sapiens
aaccacgatgtctttggcacagcctctcatctgtcagatgggagcggggaccccggagagggagtcagccgaggtcctggcattccttgtgaacccccgtctgtgggtttctggtccagtgtcccttctccagattagatggcttaggcctcctctaagggggtgggcgtgcacatccggagagctgtctggtgtgcaggactgggctgcaggttaccctgaactgcaaccatcttagagcaaggcccagcttgcagcaggaggagctgcaggccgcccaccctagccacggcccctgccctggcaggaagcttccaagagtaaacactgcctaatcgtcccgcccagtagtgagcaggcctgtcccattccatactgaccagattcccagtcaccaaggccccctctcactccgctccactcctcgggctggctctcctgaggatgcaccagcgtcacccccgggcaagatgccctcccctctgtgtggccggaatccttgcctgtggctttctcctgggctgctggggaccctcccatttccagcagagttgtcttcaggctttggagccacaggccgtgtcttcttacttgagccctggtgctcccttaaaaggccgccctccttcccctggcttccagaggcagaggcagaggcagaggcgggctgcaggcggcatcctacacctggagctgctggtggccgtgggccccgatgtcttccaggctcaccaggaggacacagagcgctatgtgctcaccaacctcaacatcggggcagaactgcttcgggacccgtccctgggggctcagtttcgggtgcacctggtgaagatggtcattctgacagagcctgagggtgccccaaatatcacagccaacctcacctcgtccctgctgagcgtctgtgggtggagccagaccatcaaccctgaggacgacacggatcctggccatgctgacctggtcctctatatcactaggtttgacctggagttgcctgatggtaaccggcaggtgcggggcgtcacccagctgggcggtgcctgctccccaacctggagctgcctcattaccgaggacactggcttcgacctgggagtcaccattgcccatgagattgggcacagcttcggcctggagcacgacggcgcgcccggcagcggctgcggccccagcggacacgtgatggcttcggacggcgccgcgccccgcgccggcctcgcctggtccccctgcagccgccggcagctgctgagcctgctcagcgcaggacgggcgcgctgcgtgtgggacccgccgcggcctcaacccgggtccgcggggcacccgccggatgcgcagcctggcctctactacagcgccaacgagcagtgccgcgtggccttcggccccaaggctgtcgcctgcaccttcgccagggagcacctggatatgtgccaggccctctcctgccacacagacccgctggaccaaagcagctgcagccgcctcctcgttcctctcctggatgggacagaatgtggcgtggagaagtggtgctccaagggtcgctgccgctccctggtggagctgacccccatagcagcagtgcatgggcgctggtctagctggggtccccgaagtccttgctcccgctcctgcggaggaggtgtggtcaccaggaggcggcagtgcaacaaccccagacctgcctttggggggcgtgcatgtgttggtgctgacctccaggccgagatgtgcaacactcaggcctgcgagaagacccagctggagttcatgtcgcaacagtgcgccaggaccgacggccagccgctgcgctcctcccctggcggcgcctccttctaccactggggtgctgctgtaccacacagccaaggggatgctctgtgcagacacatgtgccgggccattggcgagagcttcatcatgaagcgtggagacagcttcctcgatgggacccggtgtatgccaagtggcccccgggaggacgggaccctgagcctgtgtgtgtcgggcagctgcaggacatttggctgtgatggtaggatggactcccagcaggtatgggacaggtgccaggtgtgtggtggggacaacagcacgtgcagcccacggaagggctctttcacagctggcagagcgagagaatatgtcacatttctgacagttacccccaacctgaccagtgtctacattgccaaccacaggcctctcttcacacacttggcggtgaggatcggagggcgctatgtcgtggctgggaagatgagcatctcccctaacaccacctacccctccctcctggaggatggtcgtgtcgagtacagagtggccctcaccgaggaccggctgccccgcctggaggagatccgcatctggggacccctccaggaagatgctgacatccaggtttacaggcggtatggcgaggagtatggcaacctcacccgcccagacatcaccttcacctacttccagcctaagccacggcaggcctgggtgtgggccgctgtgcgtgggccctgctcggtgagctgtggggcagggctgcgctgggtaaactacagctgcctggaccaggccaggaaggagttggtggagactgtccagtgccaagggagccagcagccaccagcgtggccagaggcctgcgtgctcgaaccctgccctccctactgggcggtgggagacttcggcccatgcagcgcctcctgtgggggcggcctgcgggagcggccagtgcgctgcgtggaggcccagggcagcctcctgaagacattgcccccagcccggtgcagagcaggggcccagcagccagctgtggcgctggaaacctgcaacccccagccctgccctgccaggtgggaggtgtcagagcccagctcatgcacatcagctggtggagcaggcctggccttggagaacgagacctgtgtgccaggggcagatggcctggaggctccagtgactgaggggcctggctccgtagatgagaagctgcctgcccctgagccctgtgtcgggatgtcatgtcctccaggctggggccatctggatgccacctctgcaggggagaaggctccctccccatggggcagcatcaggacgggggctcaagctgcacacgtgtggacccctgtggcagggtcgtgctccgtctcctgcgggcgaggtctgatggagctgcgtttcctgtgcatggactctgccctcagggtgcctgtccaggaagagctgtgtggcctggcaagcaagcctgggagccggcgggaggtctgccaggctgtcccgtgccctgctcggtggcagtacaagctggcggcctgcagcgtgagctgtgggagaggggtcgtgcggaggatcctgtattgtgcccgggcccatggggaggacgatggtgaggagatcctgttggacacccagtgccaggggctgcctcgcccggaaccccaggaggcctgcagcctggagccctgcccacctaggtggaaagtcatgtcccttggcccatgttcggccagctgtggccttggcactgctagacgctcggtggcctgtgtgcagctcgaccaaggccaggacgtggaggtggacgaggcggcctgtgcggcgctggtgcggcccgaggccagtgtcccctgtctcattgccgactgcacctaccgctggcatgttggcacctggatggagtgctctgtttcctgtggggatggcatccagcgccggcgtgacacctgcctcggaccccaggcccaggcgcctgtgccagctgatttctgccagcacttgcccaagccggtgactgtgcgtggctgctgggctgggccctgtgtgggacagggtgcctgtggcaggcagcaccttgagccaacaggaaccattgacatgcgaggcccagggcaggcagactgtgcagtggccattgggcggcccctcggggaggtggtgaccctccgcgtccttgagagttctctcaactgcagtgcgggggacatgttgctgctttggggccggctcacctggaggaagatgtgcaggaagctgttggacatgactttcagctccaagaccaacacgctggtggtgaggcagcgctgcgggcggccaggaggtggggtgctgctgcggtatgggagccagcttgctcctgaaaccttctacagagaatgtgacatgcagctctttgggccctggggtgaaatcgtgagcccctcgctgagtccagccacgagtaatgcagggggctgccggctcttcattaatgtggctccgcacgcacggattgccatccatgccctggccaccaacatgggcgctgggaccgagggagccaatgccagctacatcttgatccgggacacccacagcttgaggaccacagcgttccatgggcagcaggtgctctactgggagtcagagagcagccaggctgagatggagttcagcgagggcttcctgaaggctcaggccagcctgcggggccagtactggaccctccaatcatgggtaccggagatgcaggaccctcagtcctggaagggaaaggaaggaacctgagggtcattgaacatttgttccgtgtctggccagccctggagggttgacccctggtctcagtgctttccaattcgaactttttccaatcttaggtatctactttagagtcttctccaatgtccaaaaggctagggggttggaggtggggactctggaaaagcagcccccatttcctcgggtaccaataaataaaacatgcaggctgaaaaaaaaaaaaaaaaa

SEQ ID NO: 361 - protein, 1371 aa, Homo sapiens
MHQRHPRARCPPLCVAGILACGFLLGCWGPSHFQQSCLQALEPQAVSSYLSPGAPLKGRPPSPGFQRQRQRQRRAAGGILHLELLVAVGPDVFQAHQEDTERYVLTNLNIGAELLRDPSLGAQFRVHLVKMVILTEPEGAPNITANLTSSLLSVCGWSQTINPEDDTDPGHADLVLYITRFDLELPDGNRQVRGVTQLGGACSPTWSCLITEDTGFDLGVTIAHEIGHSFGLEHDGAPGSGCGPSGHVMASDGAAPRAGLAWSPCSRRQLLSLLSAGRARCVWDPPRPQPGSAGHPPDAQPGLYYSANEQCRVAFGPKAVACTFAREHLDMCQALSCHTDPLDQSSCSRLLVPLLDGTECGVEKWCSKGRCRSLVELTPIAAVHGRWSSWGPRSPCSRSCGGGVVTRRRQCNNPRPAFGGRACVGADLQAEMCNTQACEKTQLEFMSQQCARTDGQPLRSSPGGASFYHWGAAVPHSQGDALCRHMCRAIGESFIMKRGDSFLDGTRCMPSGPREDGTLSLCVSGSCRTFGCDGRMDSQQVWDRCQVCGGDNSTCSPRKGSFTAGRAREYVTFLTVTPNLTSVYIANHRPLFTHLAVRIGGRYVVAGKMSISPNTTYPSLLEDGRVEYRVALTEDRLPRLEEIRIWGPLQEDADIQVYRRYGEEYGNLTRPDITFTYFQPKPRQAWVWAAVRGPCSVSCGAGLRWVNYSCLDQARKELVETVQCQGSQQPPAWPEACVLEPCPPYWAVGDFGPCSASCGGGLRERPVRCVEAQGSLLKTLPPARCRAGAQQPAVALETCNPQPCPARWEVSEPSSCTSAGGAGLALENETCVPGADGLEAPVTEGPGSVDEKLPAPEPCVGMSCPPGWGHLDATSAGEKAPSPWGSIRTGAQAAHVWTPVAGSCSVSCGRGLMELRFLCMDSALRVPVQEELCGLASKPGSRREVCQAVPCPARWQYKLAACSVSCGRGVVRRILYCARAHGEDDGEEILLDTQCQGLPRPEPQEACSLEPCPPRWKVMSLGPCSASCGLGTARRSVACVQLDQGQDVEVDEAACAALVRPEASVPCLIADCTYRWHVGTWMECSVSCGDGIQRRRDTCLGPQAQAPVPADFCQHLPKPVTVRGCWAGPCVGQGACGRQHLEPTGTIDMRGPGQADCAVAIGRPLGEVVTLRVLESSLNCSAGDMLLLWGRLTWRKMCRKLLDMTFSSKTNTLVVRQRCGRPGGGVLLRYGSQLAPETFYRECDMQLFGPWGEIVSPSLSPATSNAGGCRLFINVAPHARIAIHALATNMGAGTEGANASYILIRDTHSLRTTAFHGQQVLYWESESSQAEMEFSEGFLKAQASLRGQYWTLQSWVPEMQDPQSWKGKEGT

SEQ ID NO: 362 - DNA, 3345 bp, Homo sapiens
aaccacgatgtctttggcacagcctctcatctgtcagatgggagcggggaccccggagagggagtcagccgaggtcctggcattccttgtgaacccccgtctgtgggtttctggtccagtgtcccttctccagattagatggcttaggcctcctctaagggggtgggcgtgcacatccggagagctgtctggtgtgcaggactgggctgcaggttaccctgaactgcaaccatcttagagcaaggcccagcttgcagcaggaggagctgcaggccgcccaccctagccacggcccctgccctggcaggaagcttccaagagtaaacactgcctaatcgtcccgcccagtagtgagcaggcctgtcccattccatactgaccagattcccagtcaccaaggccccctctcactccgctccactcctcgggctggctctcctgaggatgcaccagcgtcacccccgggcaagatgccctcccctctgtgtggccggaatccttgcctgtggctttctcctgggctgctggggaccctcccatttccagcagagttgtcttcaggctttggagccacaggccgtgtcttcttacttgagccctggtgctcccttaaaaggccgccctccttcccctggcttccagaggcagaggcagaggcagaggcgggctgcaggcggcatcctacacctggagctgctggtggccgtgggccccgatgtcttccaggctcaccaggaggacacagagcgctatgtgctcaccaacctcaacatcggggcagaactgcttcgggacccgtccctgggggctcagtttcgggtgcacctggtgaagatggtcattctgacagagcctgagggtgccccaaatatcacagccaacctcacctcgtccctgctgagcgtctgtgggtggagccagaccatcaaccctgaggacgacacggatcctggccatgctgacctggtcctctatatcactaggtttgacctggagttgcctgatggtaaccggcaggtgcggggcgtcacccagctgggcggtgcctgctccccaacctggagctgcctcattaccgaggacactggcttcgacctgggagtcaccattgcccatgagattgggcacagcttcggcctggagcacgacggcgcgcccggcagcggctgcggccccagcggacacgtgatggcttcggacggcgccgcgccccgcgccggcctcgcctggtccccctgcagccgccggcagctgctgagcctgctcagacccgtccctccgtcgccgctccctctgctggccacccacctctgcgccggcaggagccttagtcttggtcccagccaagagccggctcctggtggggggcgcgggccgagaactcctgttcccactcacaaaaggccacgcttccaaacgcttccatcctcgtgcccactcctccgtcccgcctcctcccggtgtacaccccgggactgagccgggcctgagccgggccttgtcgcagcgcaggacgggcgcgctgcgtgtgggacccgccgcggcctcaacccgggtccgcggggcacccgccggatgcgcagcctggcctctactacagcgccaacgagcagtgccgcgtggccttcggccccaaggctgtcgcctgcaccttcgccagggagcacctggtgagtctgccggcggtggcctgggattggctgtgaggtccctccgcatcacccagctcacgtcccccaaaacgtgcatggatatgtgccaggccctctcctgccacacagacccgctggaccaaagcagctgcagccgcctcctcgttcctctcctggatgggacagaatgtggcgtggagaagtggtgctccaagggtcgctgccgctccctggtggagctgacccccatagcagcagtgcatgggcgctggtctagctggggtccccgaagtccttgctcccgctcctgcggaggaggtgtggtcaccaggaggcggcagtgcaacaaccccagacctgcctttggggggcgtgcatgtgttggtgctgacctccaggccgagatgtgcaacactcaggcctgcgagaagacccagctggagttcatgtcgcaacagtgcgccaggaccgacggccagccgctgcgctcctcccctggcggcgcctccttctaccactggggtgctgctgtaccacacagccaaggggatgctctgtgcagacacatgtgccgggccattggcgagagcttcatcatgaagcgtggagacagcttcctcgatgggacccggtgtatgccaagtggcccccgggaggacgggaccctgagcctgtgtgtgtcgggcagctgcaggacatttggctgtgatggtaggatggactcccagcaggtatgggacaggtgccaggtgtgtggtggggacaacagcacgtgcagcccacggaagggctctttcacagctggcagagcgagagaatatgtcacatttctgacagttacccccaacctgaccagtgtctacattgccaaccacaggcctctcttcacacacttggcggtgaggatcggagggcgctatgtcgtggctgggaagatgagcatctcccctaacaccacctacccctccctcctggaggatggtcgtgtcgagtacagagtggccctcaccgaggaccggctgccccgcctggaggagatccgcatctggggacccctccaggaagatgctgacatccaggtgggaggtgtcagagcccagctcatgcacatcagctggtggagcaggcctggccttggagaacgagacctgtgtgccaggggcagatggcctggaggctccagtgactgaggggcctggctccgtagatgagaagctgcctgcccctgagccctgtgtcgggatgtcatgtcctccaggctggggccatctggatgccacctctgcaggggagaaggctccctccccatggggcagcatcaggacgggggctcaagctgcacacgtgtggacccctgtgcagggtcgtgctccgtctcctgcgggcgaggtctgatggagctgcgtttcctgtgcatggactctgccctcagggtgcctgtccaggaagagctgtgtggcctggcaagcaagcctgggagccggcgggaggtctgccaggctgtcccgtgccctgctcggtggcagtacaagctggcggcctgcagcgtgagctgtgggagaggggtcgtgcggaggatcctgtattgtgcccgggcccatggggaggacgatggtgaggagatcctgttggacacccagtgccaggggctgcctcgcccggaaccccaggaggcctgcagcctggagccctg

SEQ ID NO: 363 - protein, 344 aa, Homo sapiens
MHQRHPRARCPPLCVAGILACGFLLGCWGPSHFQQSCLQALEPQAVSSYLSPGAPLKGRPPSPGFQRQRQRQRRAAGGILHLELLVAVGPDVFQAHQEDTERYVLTNLNIGAELLRDPSLGAQFRVHLVKMVILTEPEGAPNITANLTSSLLSVCGWSQTINPEDDTDPGHADLVLYITRFDLELPDGNRQVRGVTQLGGACSPTWSCLITEDTGFDLGVTIAHEIGHSFGLEHDGAPGSGCGPSGHVMASDGAAPRAGLAWSPCSRRQLLSLLRPVPPSPLPLLATHLCAGRSLSLGPSQEPAPGGGRGPRTPVPTHKRPRFQTLPSSCPLLRPASSRCTPRD

SEQ ID NO: 364 - DNA, 2402 bp, Homo sapiens
gcccgcgccggctgtgctgcacagggggaggagagggaaccccaggcgcgagcgggaagaggggacctgcagccacaacttctctggtcctctgcatcccttctgtccctccacccgtccccttccccaccctctggcccccaccttcttggaggcgacaacccccgggaggcattagaagggatttttcccgcaggttgcgaagggaagcaaacttggtggcaacttgcctcccggtgcgggcgtctctcccccaccgtctcaacatgcttaggggtccggggcccgggctgctgctgctggccgtccagtgcctggggacagcggtgccctccacgggagcctcgaagagcaagaggcaggctcagcaaatggttcagccccagtccccggtggctgtcagtcaaagcaagcccggttgttatgacaatggaaaacactatcagataaatcaacagtgggagcggacctacctaggcaatgcgttggtttgtacttgttatggaggaagccgaggttttaactgcgagagtaaacctgaagctgaagagacttgctttgacaagtacactgggaacacttaccgagtgggtgacacttatgagcgtcctaaagactccatgatctgggactgtacctgcatcggggctgggcgagggagaataagctgtaccatcgcaaaccgctgccatgaagggggtcagtcctacaagattggtgacacctggaggagaccacatgagactggtggttacatgttagagtgtgtgtgtcttggtaatggaaaaggagaatggacctgcaagcccatagctgagaagtgttttgatcatgctgctgggacttcctatgtggtcggagaaacgtgggagaagccctaccaaggctggatgatggtagattgtacttgcctgggagaaggcagcggacgcatcacttgcacttctagaaatagatgcaacgatcaggacacaaggacatcctatagaattggagacacctggagcaagaaggataatcgaggaaacctgctccagtgcatctgcacaggcaacggccgaggagagtggaagtgtgagaggcacacctctgtgcagaccacatcgagcggatctggccccttcaccgatgttcgtgcagctgtttaccaaccgcagcctcacccccagcctcctccctatggccactgtgtcacagacagtggtgtggtctactctgtggggatgcagtggctgaagacacaaggaaataagcaaatgctttgcacgtgcctgggcaacggagtcagctgccaagagacagctgtaacccagacttacggtggcaactcaaatggagagccatgtgtcttaccattcacctacaatggcaggacgttctactcctgcaccacagaagggcgacaggacggacatctttggtgcagcacaacttcgaattatgagcaggaccagaaatactctttctgcacagaccacactgttttggttcagactcgaggaggaaattccaatggtgccttgtgccacttccccttcctatacaacaaccacaattacactgattgcacttctgagggcagaagagacaacatgaagtggtgtgggaccacacagaactatgatgccgaccagaagtttgggttctgccccatggctgcccacgaggaaatctgcacaaccaatgaaggggtcatgtaccgcattggagatcagtgggataagcagcatgacatgggtcacatgatgaggtgcacgtgtgttgggaatggtcgtggggaatggacatgcattgcctactcgcagcttcgagatcagtgcattgttgatgacatcacttacaatgtgaacgacacattccacaagcgtcatgaagaggggcacatgctgaactgtacatgcttcggtcagggtcggggcaggtggaagtgtgatcccgtcgaccaatgccaggattcagagactgggacgttttatcaaattggagattcatgggagaagtatgtgcatggtgtcagataccagtgctactgctatggccgtggcattggggagtggcattgccaacctttacagacctatccaagctcaagtggtcctgtcgaagtatttatcactgagactccgagtcagcccaactcccaccccatccagtggaatgcaccacagccatctcacatttccaagtacattctcaggtggagacctgtgagtatcccacccagaaaccttggatactgagtctcctaatcttatcaattctgatggtttctttttttcccagcttttgagccaacaactctgattaactattcctatagcatttactatatttgtttagtgaacaaacaatatgtggtcaattaaattgacttgtagactgaaaaaaaaaaaaaaaaaaaa

SEQ ID NO: 365 - protein, 657 aa, Homo sapiens
MLRGPGPGLLLLAVQCLGTAVPSTGASKSKRQAQQMVQPQSPVAVSQSKPGCYDNGKHYQINQQWERTYLGNALVCTCYGGSRGFNCESKPEAEETCFDKYTGNTYRVGDTYERPKDSMIWDCTCIGAGRGRISCTIANRCHEGGQSYKIGDTWRRPHETGGYMLECVCLGNGKGEWTCKPIAEKCFDHAAGTSYVVGETWEKPYQGWMMVDCTCLGEGSGRITCTSRNRCNDQDTRTSYRIGDTWSKKDNRGNLLQCICTGNGRGEWKCERHTSVQTTSSGSGPFTDVRAAVYQPQPHPQPPPYGHCVTDSGVVYSVGMQWLKTQGNKQMLCTCLGNGVSCQETAVTQTYGGNSNGEPCVLPFTYNGRTFYSCTTEGRQDGHLWCSTTSNYEQDQKYSFCTDHTVLVQTRGGNSNGALCHFPFLYNNHNYTDCTSEGRRDNMKWCGTTQNYDADQKFGFCPMAAHEEICTTNEGVMYRIGDQWDKQHDMGHMMRCTCVGNGRGEWTCIAYSQLRDQCIVDDITYNVNDTFHKRHEEGHMLNCTCFGQGRGRWKCDPVDQCQDSETGTFYQIGDSWEKYVHGVRYQCYCYGRGIGEWHCQPLQTYPSSSGPVEVFITETPSQPNSHPIQWNAPQPSHISKYILRWRPVSIPPRNLGY

SEQ ID NO: 366 - DNA, 7912 bp, Homo sapiens
gcccgcgccggctgtgctgcacagggggaggagagggaaccccaggcgcgagcgggaagaggggacctgcagccacaacttctctggtcctctgcatcccttctgtccctccacccgtccccttccccaccctctggcccccaccttcttggaggcgacaacccccgggaggcattagaagggatttttcccgcaggttgcgaagggaagcaaacttggtggcaacttgcctcccggtgcgggcgtctctcccccaccgtctcaacatgcttaggggtccggggcccgggctgctgctgctggccgtccagtgcctggggacagcggtgccctccacgggagcctcgaagagcaagaggcaggctcagcaaatggttcagccccagtccccggtggctgtcagtcaaagcaagcccggttgttatgacaatggaaaacactatcagataaatcaacagtgggagcggacctacctaggcaatgcgttggtttgtacttgttatggaggaagccgaggttttaactgcgagagtaaacctgaagctgaagagacttgctttgacaagtacactgggaacacttaccgagtgggtgacacttatgagcgtcctaaagactccatgatctgggactgtacctgcatcggggctgggcgagggagaataagctgtaccatcgcaaaccgctgccatgaagggggtcagtcctacaagattggtgacacctggaggagaccacatgagactggtggttacatgttagagtgtgtgtgtcttggtaatggaaaaggagaatggacctgcaagcccatagctgagaagtgttttgatcatgctgctgggacttcctatgtggtcggagaaacgtgggagaagccctaccaaggctggatgatggtagattgtacttgcctgggagaaggcagcggacgcatcacttgcacttctagaaatagatgcaacgatcaggacacaaggacatcctatagaattggagacacctggagcaagaaggataatcgaggaaacctgctccagtgcatctgcacaggcaacggccgaggagagtggaagtgtgagaggcacacctctgtgcagaccacatcgagcggatctggccccttcaccgatgttcgtgcagctgtttaccaaccgcagcctcacccccagcctcctccctatggccactgtgtcacagacagtggtgtggtctactctgtggggatgcagtggctgaagacacaaggaaataagcaaatgctttgcacgtgcctgggcaacggagtcagctgccaagagacagctgtaacccagacttacggtggcaactcaaatggagagccatgtgtcttaccattcacctacaatggcaggacgttctactcctgcaccacagaagggcgacaggacggacatctttggtgcagcacaacttcgaattatgagcaggaccagaaatactctttctgcacagaccacactgttttggttcagactcgaggaggaaattccaatggtgccttgtgccacttccccttcctatacaacaaccacaattacactgattgcacttctgagggcagaagagacaacatgaagtggtgtgggaccacacagaactatgatgccgaccagaagtttgggttctgccccatggctgcccacgaggaaatctgcacaaccaatgaaggggtcatgtaccgcattggagatcagtgggataagcagcatgacatgggtcacatgatgaggtgcacgtgtgttgggaatggtcgtggggaatggacatgcattgcctactcgcagcttcgagatcagtgcattgttgatgacatcacttacaatgtgaacgacacattccacaagcgtcatgaagaggggcacatgctgaactgtacatgcttcggtcagggtcggggcaggtggaagtgtgatcccgtcgaccaatgccaggattcagagactgggacgttttatcaaattggagattcatgggagaagtatgtgcatggtgtcagataccagtgctactgctatggccgtggcattggggagtggcattgccaacctttacagacctatccaagctcaagtggtcctgtcgaagtatttatcactgagactccgagtcagcccaactcccaccccatccagtggaatgcaccacagccatctcacatttccaagtacattctcaggtggagacctaaaaattctgtaggccgttggaaggaagctaccataccaggccacttaaactcctacaccatcaaaggcctgaagcctggtgtggtatacgagggccagctcatcagcatccagcagtacggccaccaagaagtgactcgctttgacttcaccaccaccagcaccagcacacctgtgaccagcaacaccgtgacaggagagacgactcccttttctcctcttgtggccacttctgaatctgtgaccgaaatcacagccagtagctttgtggtctcctgggtctcagcttccgacaccgtgtcgggattccgggtggaatatgagctgagtgaggagggagatgagccacagtacctggatcttccaagcacagccacttctgtgaacatccctgacctgcttcctggccgaaaatacattgtaaatgtctatcagatatctgaggatggggagcagagtttgatcctgtctacttcacaaacaacagcgcctgatgcccctcctgacccgactgtggaccaagttgatgacacctcaattgttgttcgctggagcagaccccaggctcccatcacagggtacagaatagtctattcgccatcagtagaaggtagcagcacagaactcaaccttcctgaaactgcaaactccgtcaccctcagtgacttgcaacctggtgttcagtataacatcactatctatgctgtggaagaaaatcaagaaagtacacctgttgtcattcaacaagaaaccactggcaccccacgctcagatacagtgccctctcccagggacctgcagtttgtggaagtgacagacgtgaaggtcaccatcatgtggacaccgcctgagagtgcagtgaccggctaccgtgtggatgtgatccccgtcaacctgcctggcgagcacgggcagaggctgcccatcagcaggaacacctttgcagaagtcaccgggctgtcccctggggtcacctattacttcaaagtctttgcagtgagccatgggagggagagcaagcctctgactgctcaacagacaaccaaactggatgctcccactaacctccagtttgtcaatgaaactgattctactgtcctggtgagatggactccacctcgggcccagataacaggataccgactgaccgtgggccttacccgaagaggacagcccaggcagtacaatgtgggtccctctgtctccaagtacccactgaggaatctgcagcctgcatctgagtacaccgtatccctcgtggccataaagggcaaccaagagagccccaaagccactggagtctttaccacactgcagcctgggagctctattccaccttacaacaccgaggtgactgagaccaccattgtgatcacatggacgcctgctccaagaattggttttaagctgggtgtacgaccaagccagggaggagaggcaccacgagaagtgacttcagactcaggaagcatcgttgtgtccggcttgactccaggagtagaatacgtctacaccatccaagtcctgagagatggacaggaaagagatgcgccaattgtaaacaaagtggtgacaccattgtctccaccaacaaacttgcatctggaggcaaaccctgacactggagtgctcacagtctcctgggagaggagcaccaccccagacattactggttatagaattaccacaacccctacaaacggccagcagggaaattctttggaagaagtggtccatgctgatcagagctcctgcacttttgataacctgagtcccggcctggagtacaatgtcagtgtttacactgtcaaggatgacaaggaaagtgtccctatctctgataccatcatcccagctgttcctcctcccactgacctgcgattcaccaacattggtccagacaccatgcgtgtcacctgggctccacccccatccattgatttaaccaacttcctggtgcgttactcacctgtgaaaaatgaggaagatgttgcagagttgtcaatttctccttcagacaatgcagtggtcttaacaaatctcctgcctggtacagaatatgtagtgagtgtctccagtgtctacgaacaacatgagagcacacctcttagaggaagacagaaaacaggtcttgattccccaactggcattgacttttctgatattactgccaactcttttactgtgcactggattgctcctcgagccaccatcactggctacaggatccgccatcatcccgagcacttcagtgggagacctcgagaagatcgggtgccccactctcggaattccatcaccctcaccaacctcactccaggcacagagtatgtggtcagcatcgttgctcttaatggcagagaggaaagtcccttattgattggccaacaatcaacagtttctgatgttccgagggacctggaagttgttgctgcgacccccaccagcctactgatcagctgggatgctcctgctgtcacagtgagatattacaggatcacttacggagagacaggaggaaatagccctgtccaggagttcactgtgcctgggagcaagtctacagctaccatcagcggccttaaacctggagttgattataccatcactgtgtatgctgtcactggccgtggagacagccccgcaagcagcaagccaatttccattaattaccgaacagaaattgacaaaccatcccagatgcaagtgaccgatgttcaggacaacagcattagtgtcaagtggctgccttcaagttcccctgttactggttacagagtaaccaccactcccaaaaatggaccaggaccaacaaaaactaaaactgcaggtccagatcaaacagaaatgactattgaaggcttgcagcccacagtggagtatgtggttagtgtctatgctcagaatccaagcggagagagtcagcctctggttcagactgcagtaaccactattcctgcaccaactgacctgaagttcactcaggtcacacccacaagcctgagcgcccagtggacaccacccaatgttcagctcactggatatcgagtgcgggtgacccccaaggagaagaccggaccaatgaaagaaatcaaccttgctcctgacagctcatccgtggttgtatcaggacttatggtggccaccaaatatgaagtgagtgtctatgctcttaaggacactttgacaagcagaccagctcagggagttgtcaccactctggagaatgtcagcccaccaagaagggctcgtgtgacagatgctactgagaccaccatcaccattagctggagaaccaagactgagacgatcactggcttccaagttgatgccgttccagccaatggccagactccaatccagagaaccatcaagccagatgtcagaagctacaccatcacaggtttacaaccaggcactgactacaagatctacctgtacaccttgaatgacaatgctcggagctcccctgtggtcatcgacgcctccactgccattgatgcaccatccaacctgcgtttcctggccaccacacccaattccttgctggtatcatggcagccgccacgtgccaggattaccggctacatcatcaagtatgagaagcctgggtctcctcccagagaagtggtccctcggccccgccctggtgtcacagaggctactattactggcctggaaccgggaaccgaatatacaatttatgtcattgccctgaagaataatcagaagagcgagcccctgattggaaggaaaaagacaggacaagaagctctctctcagacaaccatctcatgggccccattccaggacacttctgagtacatcatttcatgtcatcctgttggcactgatgaagaacccttacagttcagggttcctggaacttctaccagtgccactctgacaggcctcaccagaggtgccacctacaacatcatagtggaggcactgaaagaccagcagaggcataaggttcgggaagaggttgttaccgtgggcaactctgtcaacgaaggcttgaaccaacctacggatgactcgtgctttgacccctacacagtttcccattatgccgttggagatgagtgggaacgaatgtctgaatcaggctttaaactgttgtgccagtgcttaggctttggaagtggtcatttcagatgtgattcatctagatggtgccatgacaatggtgtgaactacaagattggagagaagtgggaccgtcagggagaaaatggccagatgatgagctgcacatgtcttgggaacggaaaaggagaattcaagtgtgaccctcatgaggcaacgtgttatgatgatgggaagacataccacgtaggagaacagtggcagaaggaatatctcggtgccatttgctcctgcacatgctttggaggccagcggggctggcgctgtgacaactgccgcagacctgggggtgaacccagtcccgaaggcactactggccagtcctacaaccagtattctcagagataccatcagagaacaaacactaatgttaattgcccaattgagtgcttcatgcctttagatgtacaggctgacagagaagattcccgagagtaaatcatctttccaatccagaggaacaagcatgtctctctgccaagatccatctaaactggagtgatgttagcagacccagcttagagttcttctttctttcttaagccctttgctctggaggaagttctccagcttcagctcaactcacagcttctccaagcatcaccctgggagtttcctgagggttttctcataaatgagggctgcacattgcctgttctgcttcgaagtattcaataccgctcagtattttaaatgaagtgattctaagatttggtttgggatcaataggaaagcatatgcagccaaccaagatgcaaatgttttgaaatgatatgaccaaaattttaagtaggaaagtcacccaaacacttctgctttcacttaagtgtctggcccgcaatactgtaggaacaagcatgatcttgttactgtgatattttaaatatccacagtactcactttttccaaatgatcctagtaattgcctagaaatatctttctcttacctgttatttatcaatttttcccagtatttttatacggaaaaaattgtattgaaaacacttagtatgcagttgataagaggaatttggtataattatggtgggtgattattttttatactgtatgtgccaaagctttactactgtggaaagacaactgttttaataaaagatttacattccacaacttgaagttcatctatttgatataagacaccttcgggggaaataattcctgtgaatattctttttcaattcagcaaacatttgaaaatctatgatgtgcaagtctaattgttgatttcagtacaagattttctaaatcagttgctacaaaaactgattggtttttgtcacttcatctcttcactaatggagatagctttacactttctgctttaatagatttaagtggaccccaatatttattaaaattgctagtttaccgttcagaagtataatagaaataatctttagttgctcttttctaaccattgtaattcttcccttcttccctccacctttccttcattgaataaacctctgttcaaagagattgcctgcaagggaaataaaaatgactaagatattaaaaaaaaaaaaaaaaaa

SEQ ID NO: 367 - protein, 2176 aa, Homo sapiens
MLRGPGPGLLLLAVQCLGTAVPSTGASKSKRQAQQMVQPQSPVAVSQSKPGCYDNGKHYQINQQWERTYLGNALVCTCYGGSRGFNCESKPEAEETCFDKYTGNTYRVGDTYERPKDSMIWDCTCIGAGRGRISCTIANRCHEGGQSYKIGDTWRRPHETGGYMLECVCLGNGKGEWTCKPIAEKCFDHAAGTSYVVGETWEKPYQGWMMVDCTCLGEGSGRITCTSRNRCNDQDTRTSYRIGDTWSKKDNRGNLLQCICTGNGRGEWKCERHTSVQTTSSGSGPFTDVRAAVYQPQPHPQPPPYGHCVTDSGVVYSVGMQWLKTQGNKQMLCTCLGNGVSCQETAVTQTYGGNSNGEPCVLPFTYNGRTFYSCTTEGRQDGHLWCSTTSNYEQDQKYSFCTDHTVLVQTRGGNSNGALCHFPFLYNNHNYTDCTSEGRRDNMKWCGTTQNYDADQKFGFCPMAAHEEICTTNEGVMYRIGDQWDKQHDMGHMMRCTCVGNGRGEWTCIAYSQLRDQCIVDDITYNVNDTFHKRHEEGHMLNCTCFGQGRGRWKCDPVDQCQDSETGTFYQIGDSWEKYVHGVRYQCYCYGRGIGEWHCQPLQTYPSSSGPVEVFITETPSQPNSHPIQWNAPQPSHISKYILRWRPKNSVGRWKEATIPGHLNSYTIKGLKPGVVYEGQLISIQQYGHQEVTRFDFTTTSTSTPVTSNTVTGETTPFSPLVATSESVTEITASSFVVSWVSASDTVSGFRVEYELSEEGDEPQYLDLPSTATSVNIPDLLPGRKYIVNVYQISEDGEQSLILSTSQTTAPDAPPDPTVDQVDDTSIVVRWSRPQAPITGYRIVYSPSVEGSSTELNLPETANSVTLSDLQPGVQYNITIYAVEENQESTPVVIQQETTGTPRSDTVPSPRDLQFVEVTDVKVTIMWTPPESAVTGYRVDVIPVNLPGEHGQRLPISRNTFAEVTGLSPGVTYYFKVFAVSHGRESKPLTAQQTTKLDAPTNLQFVNETDSTVLVRWTPPRAQITGYRLTVGLTRRGQPRQYNVGPSVSKYPLRNLQPASEYTVSLVAIKGNQESPKATGVFTTLQPGSSIPPYNTEVTETTIVITWTPAPRIGFKLGVRPSQGGEAPREVTSDSGSIVVSGLTPGVEYVYTIQVLRDGQERDAPIVNKVVTPLSPPTNLHLEANPDTGVLTVSWERSTTPDITGYRITTTPTNGQQGNSLEEVVHADQSSCTFDNLSPGLEYNVSVYTVKDDKESVPISDTIIPAVPPPTDLRFTNIGPDTMRVTWAPPPSIDLTNFLVRYSPVKNEEDVAELSISPSDNAVVLTNLLPGTEYVVSVSSVYEQHESTPLRGRQKTGLDSPTGIDFSDITANSFTVHWIAPRATITGYRIRHHPEHFSGRPREDRVPHSRNSITLTNLTPGTEYVVSIVALNGREESPLLIGQQSTVSDVPRDLEVVAATPTSLLISWDAPAVTVRYYRITYGETGGNSPVQEFTVPGSKSTATISGLKPGVDYTITVYAVTGRGDSPASSKPISINYRTEIDKPSQMQVTDVQDNSISVKWLPSSSPVTGYRVTTTPKNGPGPTKTKTAGPDQTEMTIEGLQPTVEYVVSVYAQNPSGESQPLVQTAVTTIPAPTDLKFTQVTPTSLSAQWTPPNVQLTGYRVRVTPKEKTGPMKEINLAPDSSSVVVSGLMVATKYEVSVYALKDTLTSRPAQGVVTTLENVSPPRRARVTDATETTITISWRTKTETITGFQVDAVPANGQTPIQRTIKPDVRSYTITGLQPGTDYKIYLYTLNDNARSSPVVIDASTAIDAPSNLRFLATTPNSLLVSWQPPRARITGYIIKYEKPGSPPREVVPRPRPGVTEATITGLEPGTEYTIYVIALKNNQKSEPLIGRKKTGQEALSQTTISWAPFQDTSEYIISCHPVGTDEEPLQFRVPGTSTSATLTGLTRGATYNIIVEALKDQQRHKVREEVVTVGNSVNEGLNQPTDDSCFDPYTVSHYAVGDEWERMSESGFKLLCQCLGFGSGHFRCDSSRWCHDNGVNYKIGEKWDRQGENGQMMSCTCLGNGKGEFKCDPHEATCYDDGKTYHVGEQWQKEYLGAICSCTCFGGQRGWRCDNCRRPGGEPSPEGTTGQSYNQYSQRYHQRTNTNVNCPIECFMPLDVQADREDSRE

SEQ ID NO: 368 - DNA, 8647 bp, Homo sapiens
gcccgcgccggctgtgctgcacagggggaggagagggaaccccaggcgcgagcgggaagaggggacctgcagccacaacttctctggtcctctgcatcccttctgtccctccacccgtccccttccccaccctctggcccccaccttcttggaggcgacaacccccgggaggcattagaagggatttttcccgcaggttgcgaagggaagcaaacttggtggcaacttgcctcccggtgcgggcgtctctcccccaccgtctcaacatgcttaggggtccggggcccgggctgctgctgctggccgtccagtgcctggggacagcggtgccctccacgggagcctcgaagagcaagaggcaggctcagcaaatggttcagccccagtccccggtggctgtcagtcaaagcaagcccggttgttatgacaatggaaaacactatcagataaatcaacagtgggagcggacctacctaggcaatgcgttggtttgtacttgttatggaggaagccgaggttttaactgcgagagtaaacctgaagctgaagagacttgctttgacaagtacactgggaacacttaccgagtgggtgacacttatgagcgtcctaaagactccatgatctgggactgtacctgcatcggggctgggcgagggagaataagctgtaccatcgcaaaccgctgccatgaagggggtcagtcctacaagattggtgacacctggaggagaccacatgagactggtggttacatgttagagtgtgtgtgtcttggtaatggaaaaggagaatggacctgcaagcccatagctgagaagtgttttgatcatgctgctgggacttcctatgtggtcggagaaacgtgggagaagccctaccaaggctggatgatggtagattgtacttgcctgggagaaggcagcggacgcatcacttgcacttctagaaatagatgcaacgatcaggacacaaggacatcctatagaattggagacacctggagcaagaaggataatcgaggaaacctgctccagtgcatctgcacaggcaacggccgaggagagtggaagtgtgagaggcacacctctgtgcagaccacatcgagcggatctggccccttcaccgatgttcgtgcagctgtttaccaaccgcagcctcacccccagcctcctccctatggccactgtgtcacagacagtggtgtggtctactctgtggggatgcagtggctgaagacacaaggaaataagcaaatgctttgcacgtgcctgggcaacggagtcagctgccaagagacagctgtaacccagacttacggtggcaactcaaatggagagccatgtgtcttaccattcacctacaatggcaggacgttctactcctgcaccacagaagggcgacaggacggacatctttggtgcagcacaacttcgaattatgagcaggaccagaaatactctttctgcacagaccacactgttttggttcagactcgaggaggaaattccaatggtgccttgtgccacttccccttcctatacaacaaccacaattacactgattgcacttctgagggcagaagagacaacatgaagtggtgtgggaccacacagaactatgatgccgaccagaagtttgggttctgccccatggctgcccacgaggaaatctgcacaaccaatgaaggggtcatgtaccgcattggagatcagtgggataagcagcatgacatgggtcacatgatgaggtgcacgtgtgttgggaatggtcgtggggaatggacatgcattgcctactcgcagcttcgagatcagtgcattgttgatgacatcacttacaatgtgaacgacacattccacaagcgtcatgaagaggggcacatgctgaactgtacatgcttcggtcagggtcggggcaggtggaagtgtgatcccgtcgaccaatgccaggattcagagactgggacgttttatcaaattggagattcatgggagaagtatgtgcatggtgtcagataccagtgctactgctatggccgtggcattggggagtggcattgccaacctttacagacctatccaagctcaagtggtcctgtcgaagtatttatcactgagactccgagtcagcccaactcccaccccatccagtggaatgcaccacagccatctcacatttccaagtacattctcaggtggagacctaaaaattctgtaggccgttggaaggaagctaccataccaggccacttaaactcctacaccatcaaaggcctgaagcctggtgtggtatacgagggccagctcatcagcatccagcagtacggccaccaagaagtgactcgctttgacttcaccaccaccagcaccagcacacctgtgaccagcaacaccgtgacaggagagacgactcccttttctcctcttgtggccacttctgaatctgtgaccgaaatcacagccagtagctttgtggtctcctgggtctcagcttccgacaccgtgtcgggattccgggtggaatatgagctgagtgaggagggagatgagccacagtacctggatcttccaagcacagccacttctgtgaacatccctgacctgcttcctggccgaaaatacattgtaaatgtctatcagatatctgaggatggggagcagagtttgatcctgtctacttcacaaacaacagcgcctgatgcccctcctgacccgactgtggaccaagttgatgacacctcaattgttgttcgctggagcagaccccaggctcccatcacagggtacagaatagtctattcgccatcagtagaaggtagcagcacagaactcaaccttcctgaaactgcaaactccgtcaccctcagtgacttgcaacctggtgttcagtataacatcactatctatgctgtggaagaaaatcaagaaagtacacctgttgtcattcaacaagaaaccactggcaccccacgctcagatacagtgccctctcccagggacctgcagtttgtggaagtgacagacgtgaaggtcaccatcatgtggacaccgcctgagagtgcagtgaccggctaccgtgtggatgtgatccccgtcaacctgcctggcgagcacgggcagaggctgcccatcagcaggaacacctttgcagaagtcaccgggctgtcccctggggtcacctattacttcaaagtctttgcagtgagccatgggagggagagcaagcctctgactgctcaacagacaaccaaactggatgctcccactaacctccagtttgtcaatgaaactgattctactgtcctggtgagatggactccacctcgggcccagataacaggataccgactgaccgtgggccttacccgaagaggacagcccaggcagtacaatgtgggtccctctgtctccaagtacccactgaggaatctgcagcctgcatctgagtacaccgtatccctcgtggccataaagggcaaccaagagagccccaaagccactggagtctttaccacactgcagcctgggagctctattccaccttacaacaccgaggtgactgagaccaccattgtgatcacatggacgcctgctccaagaattggttttaagctgggtgtacgaccaagccagggaggagaggcaccacgagaagtgacttcagactcaggaagcatcgttgtgtccggcttgactccaggagtagaatacgtctacaccatccaagtcctgagagatggacaggaaagagatgcgccaattgtaaacaaagtggtgacaccattgtctccaccaacaaacttgcatctggaggcaaaccctgacactggagtgctcacagtctcctgggagaggagcaccaccccagacattactggttatagaattaccacaacccctacaaacggccagcagggaaattctttggaagaagtggtccatgctgatcagagctcctgcacttttgataacctgagtcccggcctggagtacaatgtcagtgtttacactgtcaaggatgacaaggaaagtgtccctatctctgataccatcatcccagaggtgccccaactcactgacctaagctttgttgatataaccgattcaagcatcggcctgaggtggaccccgctaaactcttccaccattattgggtaccgcatcacagtagttgcggcaggagaaggtatccctatttttgaagattttgtggactcctcagtaggatactacacagtcacagggctggagccgggcattgactatgatatcagcgttatcactctcattaatggcggcgagagtgcccctactacactgacacaacaaacggctgttcctcctcccactgacctgcgattcaccaacattggtccagacaccatgcgtgtcacctgggctccacccccatccattgatttaaccaacttcctggtgcgttactcacctgtgaaaaatgaggaagatgttgcagagttgtcaatttctccttcagacaatgcagtggtcttaacaaatctcctgcctggtacagaatatgtagtgagtgtctccagtgtctacgaacaacatgagagcacacctcttagaggaagacagaaaacaggtcttgattccccaactggcattgacttttctgatattactgccaactcttttactgtgcactggattgctcctcgagccaccatcactggctacaggatccgccatcatcccgagcacttcagtgggagacctcgagaagatcgggtgccccactctcggaattccatcaccctcaccaacctcactccaggcacagagtatgtggtcagcatcgttgctcttaatggcagagaggaaagtcccttattgattggccaacaatcaacagtttctgatgttccgagggacctggaagttgttgctgcgacccccaccagcctactgatcagctgggatgctcctgctgtcacagtgagatattacaggatcacttacggagagacaggaggaaatagccctgtccaggagttcactgtgcctgggagcaagtctacagctaccatcagcggccttaaacctggagttgattataccatcactgtgtatgctgtcactggccgtggagacagccccgcaagcagcaagccaatttccattaattaccgaacagaaattgacaaaccatcccagatgcaagtgaccgatgttcaggacaacagcattagtgtcaagtggctgccttcaagttcccctgttactggttacagagtaaccaccactcccaaaaatggaccaggaccaacaaaaactaaaactgcaggtccagatcaaacagaaatgactattgaaggcttgcagcccacagtggagtatgtggttagtgtctatgctcagaatccaagcggagagagtcagcctctggttcagactgcagtaaccaacattgatcgccctaaaggactggcattcactgatgtggatgtcgattccatcaaaattgcttgggaaagcccacaggggcaagtttccaggtacagggtgacctactcgagccctgaggatggaatccatgagctattccctgcacctgatggtgaagaagacactgcagagctgcaaggcctcagaccgggttctgagtacacagtcagtgtggttgccttgcacgatgatatggagagccagcccctgattggaacccagtccacagctattcctgcaccaactgacctgaagttcactcaggtcacacccacaagcctgagcgcccagtggacaccacccaatgttcagctcactggatatcgagtgcgggtgacccccaaggagaagaccggaccaatgaaagaaatcaaccttgctcctgacagctcatccgtggttgtatcaggacttatggtggccaccaaatatgaagtgagtgtctatgctcttaaggacactttgacaagcagaccagctcagggagttgtcaccactctggagaatgtcagcccaccaagaagggctcgtgtgacagatgctactgagaccaccatcaccattagctggagaaccaagactgagacgatcactggcttccaagttgatgccgttccagccaatggccagactccaatccagagaaccatcaagccagatgtcagaagctacaccatcacaggtttacaaccaggcactgactacaagatctacctgtacaccttgaatgacaatgctcggagctcccctgtggtcatcgacgcctccactgccattgatgcaccatccaacctgcgtttcctggccaccacacccaattccttgctggtatcatggcagccgccacgtgccaggattaccggctacatcatcaagtatgagaagcctgggtctcctcccagagaagtggtccctcggccccgccctggtgtcacagaggctactattactggcctggaaccgggaaccgaatatacaatttatgtcattgccctgaagaataatcagaagagcgagcccctgattggaaggaaaaagacagttcaaaagacccctttcgtcacccaccctgggtatgacactggaaatggtattcagcttcctggcacttctggtcagcaacccagtgttgggcaacaaatgatctttgaggaacatggttttaggcggaccacaccgcccacaacggccacccccataaggcataggccaagaccatacccgccgaatgtaggacaagaagctctctctcagacaaccatctcatgggccccattccaggacacttctgagtacatcatttcatgtcatcctgttggcactgatgaagaacccttacagttcagggttcctggaacttctaccagtgccactctgacaggcctcaccagaggtgccacctacaacatcatagtggaggcactgaaagaccagcagaggcataaggttcgggaagaggttgttaccgtgggcaactctgtcaacgaaggcttgaaccaacctacggatgactcgtgctttgacccctacacagtttcccattatgccgttggagatgagtgggaacgaatgtctgaatcaggctttaaactgttgtgccagtgcttaggctttggaagtggtcatttcagatgtgattcatctagatggtgccatgacaatggtgtgaactacaagattggagagaagtgggaccgtcagggagaaaatggccagatgatgagctgcacatgtcttgggaacggaaaaggagaattcaagtgtgaccctcatgaggcaacgtgttatgatgatgggaagacataccacgtaggagaacagtggcagaaggaatatctcggtgccatttgctcctgcacatgctttggaggccagcggggctggcgctgtgacaactgccgcagacctgggggtgaacccagtcccgaaggcactactggccagtcctacaaccagtattctcagagataccatcagagaacaaacactaatgttaattgcccaattgagtgcttcatgcctttagatgtacaggctgacagagaagattcccgagagtaaatcatctttccaatccagaggaacaagcatgtctctctgccaagatccatctaaactggagtgatgttagcagacccagcttagagttcttctttctttcttaagccctttgctctggaggaagttctccagcttcagctcaactcacagcttctccaagcatcaccctgggagtttcctgagggttttctcataaatgagggctgcacattgcctgttctgcttcgaagtattcaataccgctcagtattttaaatgaagtgattctaagatttggtttgggatcaataggaaagcatatgcagccaaccaagatgcaaatgttttgaaatgatatgaccaaaattttaagtaggaaagtcacccaaacacttctgctttcacttaagtgtctggcccgcaatactgtaggaacaagcatgatcttgttactgtgatattttaaatatccacagtactcactttttccaaatgatcctagtaattgcctagaaatatctttctcttacctgttatttatcaatttttcccagtatttttatacggaaaaaattgtattgaaaacacttagtatgcagttgataagaggaatttggtataattatggtgggtgattattttttatactgtatgtgccaaagctttactactgtggaaagacaactgttttaataaaagatttacattccacaacttgaagttcatctatttgatataagacaccttcgggggaaataattcctgtgaatattctttttcaattcagcaaacatttgaaaatctatgatgtgcaagtctaattgttgatttcagtacaagattttctaaatcagttgctacaaaaactgattggtttttgtcacttcatctcttcactaatggagatagctttacactttctgctttaatagatttaagtggaccccaatatttattaaaattgctagtttaccgttcagaagtataatagaaataatctttagttgctcttttctaaccattgtaattcttcccttcttccctccacctttccttcattgaataaacctctgttcaaagagattgcctgcaagggaaataaaaatgactaagatattaaaaaaaaaaaaaaaaaa

SEQ ID NO: 369 - protein, 2421 aa, Homo sapiens
MLRGPGPGLLLLAVQCLGTAVPSTGASKSKRQAQQMVQPQSPVAVSQSKPGCYDNGKHYQINQQWERTYLGNALVCTCYGGSRGFNCESKPEAEETCFDKYTGNTYRVGDTYERPKDSMIWDCTCIGAGRGRISCTIANRCHEGGQSYKIGDTWRRPHETGGYMLECVCLGNGKGEWTCKPIAEKCFDHAAGTSYVVGETWEKPYQGWMMVDCTCLGEGSGRITCTSRNRCNDQDTRTSYRIGDTWSKKDNRGNLLQCICTGNGRGEWKCERHTSVQTTSSGSGPFTDVRAAVYQPQPHPQPPPYGHCVTDSGVVYSVGMQWLKTQGNKQMLCTCLGNGVSCQETAVTQTYGGNSNGEPCVLPFTYNGRTFYSCTTEGRQDGHLWCSTTSNYEQDQKYSFCTDHTVLVQTRGGNSNGALCHFPFLYNNHNYTDCTSEGRRDNMKWCGTTQNYDADQKFGFCPMAAHEEICTTNEGVMYRIGDQWDKQHDMGHMMRCTCVGNGRGEWTCIAYSQLRDQCIVDDITYNVNDTFHKRHEEGHMLNCTCFGQGRGRWKCDPVDQCQDSETGTFYQIGDSWEKYVHGVRYQCYCYGRGIGEWHCQPLQTYPSSSGPVEVFITETPSQPNSHPIQWNAPQPSHISKYILRWRPKNSVGRWKEATIPGHLNSYTIKGLKPGVVYEGQLISIQQYGHQEVTRFDFTTTSTSTPVTSNTVTGETTPFSPLVATSESVTEITASSFVVSWVSASDTVSGFRVEYELSEEGDEPQYLDLPSTATSVNIPDLLPGRKYIVNVYQISEDGEQSLILSTSQTTAPDAPPDPTVDQVDDTSIVVRWSRPQAPITGYRIVYSPSVEGSSTELNLPETANSVTLSDLQPGVQYNITIYAVEENQESTPVVIQQETTGTPRSDTVPSPRDLQFVEVTDVKVTIMWTPPESAVTGYRVDVIPVNLPGEHGQRLPISRNTFAEVTGLSPGVTYYFKVFAVSHGRESKPLTAQQTTKLDAPTNLQFVNETDSTVLVRWTPPRAQITGYRLTVGLTRRGQPRQYNVGPSVSKYPLRNLQPASEYTVSLVAIKGNQESPKATGVFTTLQPGSSIPPYNTEVTETTIVITWTPAPRIGFKLGVRPSQGGEAPREVTSDSGSIVVSGLTPGVEYVYTIQVLRDGQERDAPIVNKVVTPLSPPTNLHLEANPDTGVLTVSWERSTTPDITGYRITTTPTNGQQGNSLEEVVHADQSSCTFDNLSPGLEYNVSVYTVKDDKESVPISDTIIPEVPQLTDLSFVDITDSSIGLRWTPLNSSTIIGYRITVVAAGEGIPIFEDFVDSSVGYYTVTGLEPGIDYDISVITLINGGESAPTTLTQQTAVPPPTDLRFTNIGPDTMRVTWAPPPSIDLTNFLVRYSPVKNEEDVAELSISPSDNAVVLTNLLPGTEYVVSVSSVYEQHESTPLRGRQKTGLDSPTGIDFSDITANSFTVHWIAPRATITGYRIRHHPEHFSGRPREDRVPHSRNSITLTNLTPGTEYVVSIVALNGREESPLLIGQQSTVSDVPRDLEVVAATPTSLLISWDAPAVTVRYYRITYGETGGNSPVQEFTVPGSKSTATISGLKPGVDYTITVYAVTGRGDSPASSKPISINYRTEIDKPSQMQVTDVQDNSISVKWLPSSSPVTGYRVTTTPKNGPGPTKTKTAGPDQTEMTIEGLQPTVEYVVSVYAQNPSGESQPLVQTAVTNIDRPKGLAFTDVDVDSIKIAWESPQGQVSRYRVTYSSPEDGIHELFPAPDGEEDTAELQGLRPGSEYTVSVVALHDDMESQPLIGTQSTAIPAPTDLKFTQVTPTSLSAQWTPPNVQLTGYRVRVTPKEKTGPMKEINLAPDSSSVVVSGLMVATKYEVSVYALKDTLTSRPAQGVVTTLENVSPPRRARVTDATETTITISWRTKTETITGFQVDAVPANGQTPIQRTIKPDVRSYTITGLQPGTDYKIYLYTLNDNARSSPVVIDASTAIDAPSNLRFLATTPNSLLVSWQPPRARITGYIIKYEKPGSPPREVVPRPRPGVTEATITGLEPGTEYTIYVIALKNNQKSEPLIGRKKTVQKTPFVTHPGYDTGNGIQLPGTSGQQPSVGQQMIFEEHGFRRTTPPTTATPIRHRPRPYPPNVGQEALSQTTISWAPFQDTSEYIISCHPVGTDEEPLQFRVPGTSTSATLTGLTRGATYNIIVEALKDQQRHKVREEVVTVGNSVNEGLNQPTDDSCFDPYTVSHYAVGDEWERMSESGFKLLCQCLGFGSGHFRCDSSRWCHDNGVNYKIGEKWDRQGENGQMMSCTCLGNGKGEFKCDPHEATCYDDGKTYHVGEQWQKEYLGAICSCTCFGGQRGWRCDNCRRPGGEPSPEGTTGQSYNQYSQRYHQRTNTNVNCPIECFMPLDVQADREDSRE

SEQ ID NO: 370 - DNA, 8272 bp, Homo sapiens
gcccgcgccggctgtgctgcacagggggaggagagggaaccccaggcgcgagcgggaagaggggacctgcagccacaacttctctggtcctctgcatcccttctgtccctccacccgtccccttccccaccctctggcccccaccttcttggaggcgacaacccccgggaggcattagaagggatttttcccgcaggttgcgaagggaagcaaacttggtggcaacttgcctcccggtgcgggcgtctctcccccaccgtctcaacatgcttaggggtccggggcccgggctgctgctgctggccgtccagtgcctggggacagcggtgccctccacgggagcctcgaagagcaagaggcaggctcagcaaatggttcagccccagtccccggtggctgtcagtcaaagcaagcccggttgttatgacaatggaaaacactatcagataaatcaacagtgggagcggacctacctaggcaatgcgttggtttgtacttgttatggaggaagccgaggttttaactgcgagagtaaacctgaagctgaagagacttgctttgacaagtacactgggaacacttaccgagtgggtgacacttatgagcgtcctaaagactccatgatctgggactgtacctgcatcggggctgggcgagggagaataagctgtaccatcgcaaaccgctgccatgaagggggtcagtcctacaagattggtgacacctggaggagaccacatgagactggtggttacatgttagagtgtgtgtgtcttggtaatggaaaaggagaatggacctgcaagcccatagctgagaagtgttttgatcatgctgctgggacttcctatgtggtcggagaaacgtgggagaagccctaccaaggctggatgatggtagattgtacttgcctgggagaaggcagcggacgcatcacttgcacttctagaaatagatgcaacgatcaggacacaaggacatcctatagaattggagacacctggagcaagaaggataatcgaggaaacctgctccagtgcatctgcacaggcaacggccgaggagagtggaagtgtgagaggcacacctctgtgcagaccacatcgagcggatctggccccttcaccgatgttcgtgcagctgtttaccaaccgcagcctcacccccagcctcctccctatggccactgtgtcacagacagtggtgtggtctactctgtggggatgcagtggctgaagacacaaggaaataagcaaatgctttgcacgtgcctgggcaacggagtcagctgccaagagacagctgtaacccagacttacggtggcaactcaaatggagagccatgtgtcttaccattcacctacaatggcaggacgttctactcctgcaccacagaagggcgacaggacggacatctttggtgcagcacaacttcgaattatgagcaggaccagaaatactctttctgcacagaccacactgttttggttcagactcgaggaggaaattccaatggtgccttgtgccacttccccttcctatacaacaaccacaattacactgattgcacttctgagggcagaagagacaacatgaagtggtgtgggaccacacagaactatgatgccgaccagaagtttgggttctgccccatggctgcccacgaggaaatctgcacaaccaatgaaggggtcatgtaccgcattggagatcagtgggataagcagcatgacatgggtcacatgatgaggtgcacgtgtgttgggaatggtcgtggggaatggacatgcattgcctactcgcagcttcgagatcagtgcattgttgatgacatcacttacaatgtgaacgacacattccacaagcgtcatgaagaggggcacatgctgaactgtacatgcttcggtcagggtcggggcaggtggaagtgtgatcccgtcgaccaatgccaggattcagagactgggacgttttatcaaattggagattcatgggagaagtatgtgcatggtgtcagataccagtgctactgctatggccgtggcattggggagtggcattgccaacctttacagacctatccaagctcaagtggtcctgtcgaagtatttatcactgagactccgagtcagcccaactcccaccccatccagtggaatgcaccacagccatctcacatttccaagtacattctcaggtggagacctaaaaattctgtaggccgttggaaggaagctaccataccaggccacttaaactcctacaccatcaaaggcctgaagcctggtgtggtatacgagggccagctcatcagcatccagcagtacggccaccaagaagtgactcgctttgacttcaccaccaccagcaccagcacacctgtgaccagcaacaccgtgacaggagagacgactcccttttctcctcttgtggccacttctgaatctgtgaccgaaatcacagccagtagctttgtggtctcctgggtctcagcttccgacaccgtgtcgggattccgggtggaatatgagctgagtgaggagggagatgagccacagtacctggatcttccaagcacagccacttctgtgaacatccctgacctgcttcctggccgaaaatacattgtaaatgtctatcagatatctgaggatggggagcagagtttgatcctgtctacttcacaaacaacagcgcctgatgcccctcctgacccgactgtggaccaagttgatgacacctcaattgttgttcgctggagcagaccccaggctcccatcacagggtacagaatagtctattcgccatcagtagaaggtagcagcacagaactcaaccttcctgaaactgcaaactccgtcaccctcagtgacttgcaacctggtgttcagtataacatcactatctatgctgtggaagaaaatcaagaaagtacacctgttgtcattcaacaagaaaccactggcaccccacgctcagatacagtgccctctcccagggacctgcagtttgtggaagtgacagacgtgaaggtcaccatcatgtggacaccgcctgagagtgcagtgaccggctaccgtgtggatgtgatccccgtcaacctgcctggcgagcacgggcagaggctgcccatcagcaggaacacctttgcagaagtcaccgggctgtcccctggggtcacctattacttcaaagtctttgcagtgagccatgggagggagagcaagcctctgactgctcaacagacaaccaaactggatgctcccactaacctccagtttgtcaatgaaactgattctactgtcctggtgagatggactccacctcgggcccagataacaggataccgactgaccgtgggccttacccgaagaggacagcccaggcagtacaatgtgggtccctctgtctccaagtacccactgaggaatctgcagcctgcatctgagtacaccgtatccctcgtggccataaagggcaaccaagagagccccaaagccactggagtctttaccacactgcagcctgggagctctattccaccttacaacaccgaggtgactgagaccaccattgtgatcacatggacgcctgctccaagaattggttttaagctgggtgtacgaccaagccagggaggagaggcaccacgagaagtgacttcagactcaggaagcatcgttgtgtccggcttgactccaggagtagaatacgtctacaccatccaagtcctgagagatggacaggaaagagatgcgccaattgtaaacaaagtggtgacaccattgtctccaccaacaaacttgcatctggaggcaaaccctgacactggagtgctcacagtctcctgggagaggagcaccaccccagacattactggttatagaattaccacaacccctacaaacggccagcagggaaattctttggaagaagtggtccatgctgatcagagctcctgcacttttgataacctgagtcccggcctggagtacaatgtcagtgtttacactgtcaaggatgacaaggaaagtgtccctatctctgataccatcatcccagctgttcctcctcccactgacctgcgattcaccaacattggtccagacaccatgcgtgtcacctgggctccacccccatccattgatttaaccaacttcctggtgcgttactcacctgtgaaaaatgaggaagatgttgcagagttgtcaatttctccttcagacaatgcagtggtcttaacaaatctcctgcctggtacagaatatgtagtgagtgtctccagtgtctacgaacaacatgagagcacacctcttagaggaagacagaaaacaggtcttgattccccaactggcattgacttttctgatattactgccaactcttttactgtgcactggattgctcctcgagccaccatcactggctacaggatccgccatcatcccgagcacttcagtgggagacctcgagaagatcgggtgccccactctcggaattccatcaccctcaccaacctcactccaggcacagagtatgtggtcagcatcgttgctcttaatggcagagaggaaagtcccttattgattggccaacaatcaacagtttctgatgttccgagggacctggaagttgttgctgcgacccccaccagcctactgatcagctgggatgctcctgctgtcacagtgagatattacaggatcacttacggagagacaggaggaaatagccctgtccaggagttcactgtgcctgggagcaagtctacagctaccatcagcggccttaaacctggagttgattataccatcactgtgtatgctgtcactggccgtggagacagccccgcaagcagcaagccaatttccattaattaccgaacagaaattgacaaaccatcccagatgcaagtgaccgatgttcaggacaacagcattagtgtcaagtggctgccttcaagttcccctgttactggttacagagtaaccaccactcccaaaaatggaccaggaccaacaaaaactaaaactgcaggtccagatcaaacagaaatgactattgaaggcttgcagcccacagtggagtatgtggttagtgtctatgctcagaatccaagcggagagagtcagcctctggttcagactgcagtaaccactattcctgcaccaactgacctgaagttcactcaggtcacacccacaagcctgagcgcccagtggacaccacccaatgttcagctcactggatatcgagtgcgggtgacccccaaggagaagaccggaccaatgaaagaaatcaaccttgctcctgacagctcatccgtggttgtatcaggacttatggtggccaccaaatatgaagtgagtgtctatgctcttaaggacactttgacaagcagaccagctcagggagttgtcaccactctggagaatgtcagcccaccaagaagggctcgtgtgacagatgctactgagaccaccatcaccattagctggagaaccaagactgagacgatcactggcttccaagttgatgccgttccagccaatggccagactccaatccagagaaccatcaagccagatgtcagaagctacaccatcacaggtttacaaccaggcactgactacaagatctacctgtacaccttgaatgacaatgctcggagctcccctgtggtcatcgacgcctccactgccattgatgcaccatccaacctgcgtttcctggccaccacacccaattccttgctggtatcatggcagccgccacgtgccaggattaccggctacatcatcaagtatgagaagcctgggtctcctcccagagaagtggtccctcggccccgccctggtgtcacagaggctactattactggcctggaaccgggaaccgaatatacaatttatgtcattgccctgaagaataatcagaagagcgagcccctgattggaaggaaaaagacagacgagcttccccaactggtaacccttccacaccccaatcttcatggaccagagatcttggatgttccttccacagttcaaaagacccctttcgtcacccaccctgggtatgacactggaaatggtattcagcttcctggcacttctggtcagcaacccagtgttgggcaacaaatgatctttgaggaacatggttttaggcggaccacaccgcccacaacggccacccccataaggcataggccaagaccatacccgccgaatgtaggtgaggaaatccaaattggtcacatccccagggaagatgtagactatcacctgtacccacacggtccgggactcaatccaaatgcctctacaggacaagaagctctctctcagacaaccatctcatgggccccattccaggacacttctgagtacatcatttcatgtcatcctgttggcactgatgaagaacccttacagttcagggttcctggaacttctaccagtgccactctgacaggcctcaccagaggtgccacctacaacatcatagtggaggcactgaaagaccagcagaggcataaggttcgggaagaggttgttaccgtgggcaactctgtcaacgaaggcttgaaccaacctacggatgactcgtgctttgacccctacacagtttcccattatgccgttggagatgagtgggaacgaatgtctgaatcaggctttaaactgttgtgccagtgcttaggctttggaagtggtcatttcagatgtgattcatctagatggtgccatgacaatggtgtgaactacaagattggagagaagtgggaccgtcagggagaaaatggccagatgatgagctgcacatgtcttgggaacggaaaaggagaattcaagtgtgaccctcatgaggcaacgtgttatgatgatgggaagacataccacgtaggagaacagtggcagaaggaatatctcggtgccatttgctcctgcacatgctttggaggccagcggggctggcgctgtgacaactgccgcagacctgggggtgaacccagtcccgaaggcactactggccagtcctacaaccagtattctcagagataccatcagagaacaaacactaatgttaattgcccaattgagtgcttcatgcctttagatgtacaggctgacagagaagattcccgagagtaaatcatctttccaatccagaggaacaagcatgtctctctgccaagatccatctaaactggagtgatgttagcagacccagcttagagttcttctttctttcttaagccctttgctctggaggaagttctccagcttcagctcaactcacagcttctccaagcatcaccctgggagtttcctgagggttttctcataaatgagggctgcacattgcctgttctgcttcgaagtattcaataccgctcagtattttaaatgaagtgattctaagatttggtttgggatcaataggaaagcatatgcagccaaccaagatgcaaatgttttgaaatgatatgaccaaaattttaagtaggaaagtcacccaaacacttctgctttcacttaagtgtctggcccgcaatactgtaggaacaagcatgatcttgttactgtgatattttaaatatccacagtactcactttttccaaatgatcctagtaattgcctagaaatatctttctcttacctgttatttatcaatttttcccagtatttttatacggaaaaaattgtattgaaaacacttagtatgcagttgataagaggaatttggtataattatggtgggtgattattttttatactgtatgtgccaaagctttactactgtggaaagacaactgttttaataaaagatttacattccacaacttgaagttcatctatttgatataagacaccttcgggggaaataattcctgtgaatattctttttcaattcagcaaacatttgaaaatctatgatgtgcaagtctaattgttgatttcagtacaagattttctaaatcagttgctacaaaaactgattggtttttgtcacttcatctcttcactaatggagatagctttacactttctgctttaatagatttaagtggaccccaatatttattaaaattgctagtttaccgttcagaagtataatagaaataatctttagttgctcttttctaaccattgtaattcttcccttcttccctccacctttccttcattgaataaacctctgttcaaagagattgcctgcaagggaaataaaaatgactaagatattaaaaaaaaaaaaaaaaaa

SEQ ID NO: 371 - protein, 2296 aa, Homo sapiens
MLRGPGPGLLLLAVQCLGTAVPSTGASKSKRQAQQMVQPQSPVAVSQSKPGCYDNGKHYQINQQWERTYLGNALVCTCYGGSRGFNCESKPEAEETCFDKYTGNTYRVGDTYERPKDSMIWDCTCIGAGRGRISCTIANRCHEGGQSYKIGDTWRRPHETGGYMLECVCLGNGKGEWTCKPIAEKCFDHAAGTSYVVGETWEKPYQGWMMVDCTCLGEGSGRITCTSRNRCNDQDTRTSYRIGDTWSKKDNRGNLLQCICTGNGRGEWKCERHTSVQTTSSGSGPFTDVRAAVYQPQPHPQPPPYGHCVTDSGVVYSVGMQWLKTQGNKQMLCTCLGNGVSCQETAVTQTYGGNSNGEPCVLPFTYNGRTFYSCTTEGRQDGHLWCSTTSNYEQDQKYSFCTDHTVLVQTRGGNSNGALCHFPFLYNNHNYTDCTSEGRRDNMKWCGTTQNYDADQKFGFCPMAAHEEICTTNEGVMYRIGDQWDKQHDMGHMMRCTCVGNGRGEWTCIAYSQLRDQCIVDDITYNVNDTFHKRHEEGHMLNCTCFGQGRGRWKCDPVDQCQDSETGTFYQIGDSWEKYVHGVRYQCYCYGRGIGEWHCQPLQTYPSSSGPVEVFITETPSQPNSHPIQWNAPQPSHISKYILRWRPKNSVGRWKEATIPGHLNSYTIKGLKPGVVYEGQLISIQQYGHQEVTRFDFTTTSTSTPVTSNTVTGETTPFSPLVATSESVTEITASSFVVSWVSASDTVSGFRVEYELSEEGDEPQYLDLPSTATSVNIPDLLPGRKYIVNVYQISEDGEQSLILSTSQTTAPDAPPDPTVDQVDDTSIVVRWSRPQAPITGYRIVYSPSVEGSSTELNLPETANSVTLSDLQPGVQYNITIYAVEENQESTPVVIQQETTGTPRSDTVPSPRDLQFVEVTDVKVTIMWTPPESAVTGYRVDVIPVNLPGEHGQRLPISRNTFAEVTGLSPGVTYYFKVFAVSHGRESKPLTAQQTTKLDAPTNLQFVNETDSTVLVRWTPPRAQITGYRLTVGLTRRGQPRQYNVGPSVSKYPLRNLQPASEYTVSLVAIKGNQESPKATGVFTTLQPGSSIPPYNTEVTETTIVITWTPAPRIGFKLGVRPSQGGEAPREVTSDSGSIVVSGLTPGVEYVYTIQVLRDGQERDAPIVNKVVTPLSPPTNLHLEANPDTGVLTVSWERSTTPDITGYRITTTPTNGQQGNSLEEVVHADQSSCTFDNLSPGLEYNVSVYTVKDDKESVPISDTIIPAVPPPTDLRFTNIGPDTMRVTWAPPPSIDLTNFLVRYSPVKNEEDVAELSISPSDNAVVLTNLLPGTEYVVSVSSVYEQHESTPLRGRQKTGLDSPTGIDFSDITANSFTVHWIAPRATITGYRIRHHPEHFSGRPREDRVPHSRNSITLTNLTPGTEYVVSIVALNGREESPLLIGQQSTVSDVPRDLEVVAATPTSLLISWDAPAVTVRYYRITYGETGGNSPVQEFTVPGSKSTATISGLKPGVDYTITVYAVTGRGDSPASSKPISINYRTEIDKPSQMQVTDVQDNSISVKWLPSSSPVTGYRVTTTPKNGPGPTKTKTAGPDQTEMTIEGLQPTVEYVVSVYAQNPSGESQPLVQTAVTTIPAPTDLKFTQVTPTSLSAQWTPPNVQLTGYRVRVTPKEKTGPMKEINLAPDSSSVVVSGLMVATKYEVSVYALKDTLTSRPAQGVVTTLENVSPPRRARVTDATETTITISWRTKTETITGFQVDAVPANGQTPIQRTIKPDVRSYTITGLQPGTDYKIYLYTLNDNARSSPVVIDASTAIDAPSNLRFLATTPNSLLVSWQPPRARITGYIIKYEKPGSPPREVVPRPRPGVTEATITGLEPGTEYTIYVIALKNNQKSEPLIGRKKTDELPQLVTLPHPNLHGPEILDVPSTVQKTPFVTHPGYDTGNGIQLPGTSGQQPSVGQQMIFEEHGFRRTTPPTTATPIRHRPRPYPPNVGEEIQIGHIPREDVDYHLYPHGPGLNPNASTGQEALSQTTISWAPFQDTSEYIISCHPVGTDEEPLQFRVPGTSTSATLTGLTRGATYNIIVEALKDQQRHKVREEVVTVGNSVNEGLNQPTDDSCFDPYTVSHYAVGDEWERMSESGFKLLCQCLGFGSGHFRCDSSRWCHDNGVNYKIGEKWDRQGENGQMMSCTCLGNGKGEFKCDPHEATCYDDGKTYHVGEQWQKEYLGAICSCTCFGGQRGWRCDNCRRPGGEPSPEGTTGQSYNQYSQRYHQRTNTNVNCPIECFMPLDVQADREDSRE

SEQ ID NO: 372 - DNA, 8815 bp, Homo sapiens
gcccgcgccggctgtgctgcacagggggaggagagggaaccccaggcgcgagcgggaagaggggacctgcagccacaacttctctggtcctctgcatcccttctgtccctccacccgtccccttccccaccctctggcccccaccttcttggaggcgacaacccccgggaggcattagaagggatttttcccgcaggttgcgaagggaagcaaacttggtggcaacttgcctcccggtgcgggcgtctctcccccaccgtctcaacatgcttaggggtccggggcccgggctgctgctgctggccgtccagtgcctggggacagcggtgccctccacgggagcctcgaagagcaagaggcaggctcagcaaatggttcagccccagtccccggtggctgtcagtcaaagcaagcccggttgttatgacaatggaaaacactatcagataaatcaacagtgggagcggacctacctaggcaatgcgttggtttgtacttgttatggaggaagccgaggttttaactgcgagagtaaacctgaagctgaagagacttgctttgacaagtacactgggaacacttaccgagtgggtgacacttatgagcgtcctaaagactccatgatctgggactgtacctgcatcggggctgggcgagggagaataagctgtaccatcgcaaaccgctgccatgaagggggtcagtcctacaagattggtgacacctggaggagaccacatgagactggtggttacatgttagagtgtgtgtgtcttggtaatggaaaaggagaatggacctgcaagcccatagctgagaagtgttttgatcatgctgctgggacttcctatgtggtcggagaaacgtgggagaagccctaccaaggctggatgatggtagattgtacttgcctgggagaaggcagcggacgcatcacttgcacttctagaaatagatgcaacgatcaggacacaaggacatcctatagaattggagacacctggagcaagaaggataatcgaggaaacctgctccagtgcatctgcacaggcaacggccgaggagagtggaagtgtgagaggcacacctctgtgcagaccacatcgagcggatctggccccttcaccgatgttcgtgcagctgtttaccaaccgcagcctcacccccagcctcctccctatggccactgtgtcacagacagtggtgtggtctactctgtggggatgcagtggctgaagacacaaggaaataagcaaatgctttgcacgtgcctgggcaacggagtcagctgccaagagacagctgtaacccagacttacggtggcaactcaaatggagagccatgtgtcttaccattcacctacaatggcaggacgttctactcctgcaccacagaagggcgacaggacggacatctttggtgcagcacaacttcgaattatgagcaggaccagaaatactctttctgcacagaccacactgttttggttcagactcgaggaggaaattccaatggtgccttgtgccacttccccttcctatacaacaaccacaattacactgattgcacttctgagggcagaagagacaacatgaagtggtgtgggaccacacagaactatgatgccgaccagaagtttgggttctgccccatggctgcccacgaggaaatctgcacaaccaatgaaggggtcatgtaccgcattggagatcagtgggataagcagcatgacatgggtcacatgatgaggtgcacgtgtgttgggaatggtcgtggggaatggacatgcattgcctactcgcagcttcgagatcagtgcattgttgatgacatcacttacaatgtgaacgacacattccacaagcgtcatgaagaggggcacatgctgaactgtacatgcttcggtcagggtcggggcaggtggaagtgtgatcccgtcgaccaatgccaggattcagagactgggacgttttatcaaattggagattcatgggagaagtatgtgcatggtgtcagataccagtgctactgctatggccgtggcattggggagtggcattgccaacctttacagacctatccaagctcaagtggtcctgtcgaagtatttatcactgagactccgagtcagcccaactcccaccccatccagtggaatgcaccacagccatctcacatttccaagtacattctcaggtggagacctaaaaattctgtaggccgttggaaggaagctaccataccaggccacttaaactcctacaccatcaaaggcctgaagcctggtgtggtatacgagggccagctcatcagcatccagcagtacggccaccaagaagtgactcgctttgacttcaccaccaccagcaccagcacacctgtgaccagcaacaccgtgacaggagagacgactcccttttctcctcttgtggccacttctgaatctgtgaccgaaatcacagccagtagctttgtggtctcctgggtctcagcttccgacaccgtgtcgggattccgggtggaatatgagctgagtgaggagggagatgagccacagtacctggatcttccaagcacagccacttctgtgaacatccctgacctgcttcctggccgaaaatacattgtaaatgtctatcagatatctgaggatggggagcagagtttgatcctgtctacttcacaaacaacagcgcctgatgcccctcctgacccgactgtggaccaagttgatgacacctcaattgttgttcgctggagcagaccccaggctcccatcacagggtacagaatagtctattcgccatcagtagaaggtagcagcacagaactcaaccttcctgaaactgcaaactccgtcaccctcagtgacttgcaacctggtgttcagtataacatcactatctatgctgtggaagaaaatcaagaaagtacacctgttgtcattcaacaagaaaccactggcaccccacgctcagatacagtgccctctcccagggacctgcagtttgtggaagtgacagacgtgaaggtcaccatcatgtggacaccgcctgagagtgcagtgaccggctaccgtgtggatgtgatccccgtcaacctgcctggcgagcacgggcagaggctgcccatcagcaggaacacctttgcagaagtcaccgggctgtcccctggggtcacctattacttcaaagtctttgcagtgagccatgggagggagagcaagcctctgactgctcaacagacaaccaaactggatgctcccactaacctccagtttgtcaatgaaactgattctactgtcctggtgagatggactccacctcgggcccagataacaggataccgactgaccgtgggccttacccgaagaggacagcccaggcagtacaatgtgggtccctctgtctccaagtacccactgaggaatctgcagcctgcatctgagtacaccgtatccctcgtggccataaagggcaaccaagagagccccaaagccactggagtctttaccacactgcagcctgggagctctattccaccttacaacaccgaggtgactgagaccaccattgtgatcacatggacgcctgctccaagaattggttttaagctgggtgtacgaccaagccagggaggagaggcaccacgagaagtgacttcagactcaggaagcatcgttgtgtccggcttgactccaggagtagaatacgtctacaccatccaagtcctgagagatggacaggaaagagatgcgccaattgtaaacaaagtggtgacaccattgtctccaccaacaaacttgcatctggaggcaaaccctgacactggagtgctcacagtctcctgggagaggagcaccaccccagacattactggttatagaattaccacaacccctacaaacggccagcagggaaattctttggaagaagtggtccatgctgatcagagctcctgcacttttgataacctgagtcccggcctggagtacaatgtcagtgtttacactgtcaaggatgacaaggaaagtgtccctatctctgataccatcatcccagaggtgccccaactcactgacctaagctttgttgatataaccgattcaagcatcggcctgaggtggaccccgctaaactcttccaccattattgggtaccgcatcacagtagttgcggcaggagaaggtatccctatttttgaagattttgtggactcctcagtaggatactacacagtcacagggctggagccgggcattgactatgatatcagcgttatcactctcattaatggcggcgagagtgcccctactacactgacacaacaaacggctgttcctcctcccactgacctgcgattcaccaacattggtccagacaccatgcgtgtcacctgggctccacccccatccattgatttaaccaacttcctggtgcgttactcacctgtgaaaaatgaggaagatgttgcagagttgtcaatttctccttcagacaatgcagtggtcttaacaaatctcctgcctggtacagaatatgtagtgagtgtctccagtgtctacgaacaacatgagagcacacctcttagaggaagacagaaaacaggtcttgattccccaactggcattgacttttctgatattactgccaactcttttactgtgcactggattgctcctcgagccaccatcactggctacaggatccgccatcatcccgagcacttcagtgggagacctcgagaagatcgggtgccccactctcggaattccatcaccctcaccaacctcactccaggcacagagtatgtggtcagcatcgttgctcttaatggcagagaggaaagtcccttattgattggccaacaatcaacagtttctgatgttccgagggacctggaagttgttgctgcgacccccaccagcctactgatcagctgggatgctcctgctgtcacagtgagatattacaggatcacttacggagagacaggaggaaatagccctgtccaggagttcactgtgcctgggagcaagtctacagctaccatcagcggccttaaacctggagttgattataccatcactgtgtatgctgtcactggccgtggagacagccccgcaagcagcaagccaatttccattaattaccgaacagaaattgacaaaccatcccagatgcaagtgaccgatgttcaggacaacagcattagtgtcaagtggctgccttcaagttcccctgttactggttacagagtaaccaccactcccaaaaatggaccaggaccaacaaaaactaaaactgcaggtccagatcaaacagaaatgactattgaaggcttgcagcccacagtggagtatgtggttagtgtctatgctcagaatccaagcggagagagtcagcctctggttcagactgcagtaaccaacattgatcgccctaaaggactggcattcactgatgtggatgtcgattccatcaaaattgcttgggaaagcccacaggggcaagtttccaggtacagggtgacctactcgagccctgaggatggaatccatgagctattccctgcacctgatggtgaagaagacactgcagagctgcaaggcctcagaccgggttctgagtacacagtcagtgtggttgccttgcacgatgatatggagagccagcccctgattggaacccagtccacagctattcctgcaccaactgacctgaagttcactcaggtcacacccacaagcctgagcgcccagtggacaccacccaatgttcagctcactggatatcgagtgcgggtgacccccaaggagaagaccggaccaatgaaagaaatcaaccttgctcctgacagctcatccgtggttgtatcaggacttatggtggccaccaaatatgaagtgagtgtctatgctcttaaggacactttgacaagcagaccagctcagggagttgtcaccactctggagaatgtcagcccaccaagaagggctcgtgtgacagatgctactgagaccaccatcaccattagctggagaaccaagactgagacgatcactggcttccaagttgatgccgttccagccaatggccagactccaatccagagaaccatcaagccagatgtcagaagctacaccatcacaggtttacaaccaggcactgactacaagatctacctgtacaccttgaatgacaatgctcggagctcccctgtggtcatcgacgcctccactgccattgatgcaccatccaacctgcgtttcctggccaccacacccaattccttgctggtatcatggcagccgccacgtgccaggattaccggctacatcatcaagtatgagaagcctgggtctcctcccagagaagtggtccctcggccccgccctggtgtcacagaggctactattactggcctggaaccgggaaccgaatatacaatttatgtcattgccctgaagaataatcagaagagcgagcccctgattggaaggaaaaagacagacgagcttccccaactggtaacccttccacaccccaatcttcatggaccagagatcttggatgttccttccacagttcaaaagacccctttcgtcacccaccctgggtatgacactggaaatggtattcagcttcctggcacttctggtcagcaacccagtgttgggcaacaaatgatctttgaggaacatggttttaggcggaccacaccgcccacaacggccacccccataaggcataggccaagaccatacccgccgaatgtaggtgaggaaatccaaattggtcacatccccagggaagatgtagactatcacctgtacccacacggtccgggactcaatccaaatgcctctacaggacaagaagctctctctcagacaaccatctcatgggccccattccaggacacttctgagtacatcatttcatgtcatcctgttggcactgatgaagaacccttacagttcagggttcctggaacttctaccagtgccactctgacaggcctcaccagaggtgccacctacaacatcatagtggaggcactgaaagaccagcagaggcataaggttcgggaagaggttgttaccgtgggcaactctgtcaacgaaggcttgaaccaacctacggatgactcgtgctttgacccctacacagtttcccattatgccgttggagatgagtgggaacgaatgtctgaatcaggctttaaactgttgtgccagtgcttaggctttggaagtggtcatttcagatgtgattcatctagatggtgccatgacaatggtgtgaactacaagattggagagaagtgggaccgtcagggagaaaatggccagatgatgagctgcacatgtcttgggaacggaaaaggagaattcaagtgtgaccctcatgaggcaacgtgttatgatgatgggaagacataccacgtaggagaacagtggcagaaggaatatctcggtgccatttgctcctgcacatgctttggaggccagcggggctggcgctgtgacaactgccgcagacctgggggtgaacccagtcccgaaggcactactggccagtcctacaaccagtattctcagagataccatcagagaacaaacactaatgttaattgcccaattgagtgcttcatgcctttagatgtacaggctgacagagaagattcccgagagtaaatcatctttccaatccagaggaacaagcatgtctctctgccaagatccatctaaactggagtgatgttagcagacccagcttagagttcttctttctttcttaagccctttgctctggaggaagttctccagcttcagctcaactcacagcttctccaagcatcaccctgggagtttcctgagggttttctcataaatgagggctgcacattgcctgttctgcttcgaagtattcaataccgctcagtattttaaatgaagtgattctaagatttggtttgggatcaataggaaagcatatgcagccaaccaagatgcaaatgttttgaaatgatatgaccaaaattttaagtaggaaagtcacccaaacacttctgctttcacttaagtgtctggcccgcaatactgtaggaacaagcatgatcttgttactgtgatattttaaatatccacagtactcactttttccaaatgatcctagtaattgcctagaaatatctttctcttacctgttatttatcaatttttcccagtatttttatacggaaaaaattgtattgaaaacacttagtatgcagttgataagaggaatttggtataattatggtgggtgattattttttatactgtatgtgccaaagctttactactgtggaaagacaactgttttaataaaagatttacattccacaacttgaagttcatctatttgatataagacaccttcgggggaaataattcctgtgaatattctttttcaattcagcaaacatttgaaaatctatgatgtgcaagtctaattgttgatttcagtacaagattttctaaatcagttgctacaaaaactgattggtttttgtcacttcatctcttcactaatggagatagctttacactttctgctttaatagatttaagtggaccccaatatttattaaaattgctagtttaccgttcagaagtataatagaaataatctttagttgctcttttctaaccattgtaattcttcccttcttccctccacctttccttcattgaataaacctctgttcaaagagattgcctgcaagggaaataaaaatgactaagatattaaaaaaaaaaaaaaaaaa

SEQ ID NO: 373 - protein, 2476 aa, Homo sapiens
LRGPGPGLLLLAVQCLGTAVPSTGASKSKRQAQQMVQPQSPVAVSQSKPGCYDNGKHYQINQQWERTYLGNALVCTCYGGSRGFNCESKPEAEETCFDKYTGNTYRVGDTYERPKDSMIWDCTCIGAGRGRISCTIANRCHEGGQSYKIGDTWRRPHETGGYMLECVCLGNGKGEWTCKPIAEKCFDHAAGTSYVVGETWEKPYQGWMMVDCTCLGEGSGRITCTSRNRCNDQDTRTSYRIGDTWSKKDNRGNLLQCICTGNGRGEWKCERHTSVQTTSSGSGPFTDVRAAVYQPQPHPQPPPYGHCVTDSGVVYSVGMQWLKTQGNKQMLCTCLGNGVSCQETAVTQTYGGNSNGEPCVLPFTYNGRTFYSCTTEGRQDGHLWCSTTSNYEQDQKYSFCTDHTVLVQTRGGNSNGALCHFPFLYNNHNYTDCTSEGRRDNMKWCGTTQNYDADQKFGFCPMAAHEEICTTNEGVMYRIGDQWDKQHDMGHMMRCTCVGNGRGEWTCIAYSQLRDQCIVDDITYNVNDTFHKRHEEGHMLNCTCFGQGRGRWKCDPVDQCQDSETGTFYQIGDSWEKYVHGVRYQCYCYGRGIGEWHCQPLQTYPSSSGPVEVFITETPSQPNSHPIQWNAPQPSHISKYILRWRPKNSVGRWKEATIPGHLNSYTIKGLKPGVVYEGQLISIQQYGHQEVTRFDFTTTSTSTPVTSNTVTGETTPFSPLVATSESVTEITASSFVVSWVSASDTVSGFRVEYELSEEGDEPQYLDLPSTATSVNIPDLLPGRKYIVNVYQISEDGEQSLILSTSQTTAPDAPPDPTVDQVDDTSIVVRWSRPQAPITGYRIVYSPSVEGSSTELNLPETANSVTLSDLQPGVQYNITIYAVEENQESTPVVIQQETTGTPRSDTVPSPRDLQFVEVTDVKVTIMWTPPESAVTGYRVDVIPVNLPGEHGQRLPISRNTFAEVTGLSPGVTYYFKVFAVSHGRESKPLTAQQTTKLDAPTNLQFVNETDSTVLVRWTPPRAQITGYRLTVGLTRRGQPRQYNVGPSVSKYPLRNLQPASEYTVSLVAIKGNQESPKATGVFTTLQPGSSIPPYNTEVTETTIVITWTPAPRIGFKLGVRPSQGGEAPREVTSDSGSIVVSGLTPGVEYVYTIQVLRDGQERDAPIVNKVVTPLSPPTNLHLEANPDTGVLTVSWERSTTPDITGYRITTTPTNGQQGNSLEEVVHADQSSCTFDNLSPGLEYNVSVYTVKDDKESVPISDTIIPEVPQLTDLSFVDITDSSIGLRWTPLNSSTIIGYRITVVAAGEGIPIFEDFVDSSVGYYTVTGLEPGIDYDISVITLINGGESAPTTLTQQTAVPPPTDLRFTNIGPDTMRVTWAPPPSIDLTNFLVRYSPVKNEEDVAELSISPSDNAVVLTNLLPGTEYVVSVSSVYEQHESTPLRGRQKTGLDSPTGIDFSDITANSFTVHWIAPRATITGYRIRHHPEHFSGRPREDRVPHSRNSITLTNLTPGTEYVVSIVALNGREESPLLIGQQSTVSDVPRDLEVVAATPTSLLISWDAPAVTVRYYRITYGETGGNSPVQEFTVPGSKSTATISGLKPGVDYTITVYAVTGRGDSPASSKPISINYRTEIDKPSQMQVTDVQDNSISVKWLPSSSPVTGYRVTTTPKNGPGPTKTKTAGPDQTEMTIEGLQPTVEYVVSVYAQNPSGESQPLVQTAVTNIDRPKGLAFTDVDVDSIKIAWESPQGQVSRYRVTYSSPEDGIHELFPAPDGEEDTAELQGLRPGSEYTVSVVALHDDMESQPLIGTQSTAIPAPTDLKFTQVTPTSLSAQWTPPNVQLTGYRVRVTPKEKTGPMKEINLAPDSSSVVVSGLMVATKYEVSVYALKDTLTSRPAQGVVTTLENVSPPRRARVTDATETTITISWRTKTETITGFQVDAVPANGQTPIQRTIKPDVRSYTITGLQPGTDYKIYLYTLNDNARSSPVVIDASTAIDAPSNLRFLATTPNSLLVSWQPPRARITGYIIKYEKPGSPPREVVPRPRPGVTEATITGLEPGTEYTIYVIALKNNQKSEPLIGRKKTDELPQLVTLPHPNLHGPEILDVPSTVQKTPFVTHPGYDTGNGIQLPGTSGQQPSVGQQMIFEEHGFRRTTPPTTATPIRHRPRPYPPNVGEEIQIGHIPREDVDYHLYPHGPGLNPNASTGQEALSQTTISWAPFQDTSEYIISCHPVGTDEEPLQFRVPGTSTSATLTGLTRGATYNIIVEALKDQQRHKVREEVVTVGNSVNEGLNQPTDDSCFDPYTVSHYAVGDEWERMSESGFKLLCQCLGFGSGHFRCDSSRWCHDNGVNYKIGEKWDRQGENGQMMSCTCLGNGKGEFKCDPHEATCYDDGKTYHVGEQWQKEYLGAICSCTCFGGQRGWRCDNCRRPGGEPSPEGTTGQSYNQYSQRYHQRTNTNVNCPIECFMPLDVQADREDSRE

SEQ ID NO: 374 - DNA, 8374 bp, Homo sapiens
gcccgcgccggctgtgctgcacagggggaggagagggaaccccaggcgcgagcgggaagaggggacctgcagccacaacttctctggtcctctgcatcccttctgtccctccacccgtccccttccccaccctctggcccccaccttcttggaggcgacaacccccgggaggcattagaagggatttttcccgcaggttgcgaagggaagcaaacttggtggcaacttgcctcccggtgcgggcgtctctcccccaccgtctcaacatgcttaggggtccggggcccgggctgctgctgctggccgtccagtgcctggggacagcggtgccctccacgggagcctcgaagagcaagaggcaggctcagcaaatggttcagccccagtccccggtggctgtcagtcaaagcaagcccggttgttatgacaatggaaaacactatcagataaatcaacagtgggagcggacctacctaggcaatgcgttggtttgtacttgttatggaggaagccgaggttttaactgcgagagtaaacctgaagctgaagagacttgctttgacaagtacactgggaacacttaccgagtgggtgacacttatgagcgtcctaaagactccatgatctgggactgtacctgcatcggggctgggcgagggagaataagctgtaccatcgcaaaccgctgccatgaagggggtcagtcctacaagattggtgacacctggaggagaccacatgagactggtggttacatgttagagtgtgtgtgtcttggtaatggaaaaggagaatggacctgcaagcccatagctgagaagtgttttgatcatgctgctgggacttcctatgtggtcggagaaacgtgggagaagccctaccaaggctggatgatggtagattgtacttgcctgggagaaggcagcggacgcatcacttgcacttctagaaatagatgcaacgatcaggacacaaggacatcctatagaattggagacacctggagcaagaaggataatcgaggaaacctgctccagtgcatctgcacaggcaacggccgaggagagtggaagtgtgagaggcacacctctgtgcagaccacatcgagcggatctggccccttcaccgatgttcgtgcagctgtttaccaaccgcagcctcacccccagcctcctccctatggccactgtgtcacagacagtggtgtggtctactctgtggggatgcagtggctgaagacacaaggaaataagcaaatgctttgcacgtgcctgggcaacggagtcagctgccaagagacagctgtaacccagacttacggtggcaactcaaatggagagccatgtgtcttaccattcacctacaatggcaggacgttctactcctgcaccacagaagggcgacaggacggacatctttggtgcagcacaacttcgaattatgagcaggaccagaaatactctttctgcacagaccacactgttttggttcagactcgaggaggaaattccaatggtgccttgtgccacttccccttcctatacaacaaccacaattacactgattgcacttctgagggcagaagagacaacatgaagtggtgtgggaccacacagaactatgatgccgaccagaagtttgggttctgccccatggctgcccacgaggaaatctgcacaaccaatgaaggggtcatgtaccgcattggagatcagtgggataagcagcatgacatgggtcacatgatgaggtgcacgtgtgttgggaatggtcgtggggaatggacatgcattgcctactcgcagcttcgagatcagtgcattgttgatgacatcacttacaatgtgaacgacacattccacaagcgtcatgaagaggggcacatgctgaactgtacatgcttcggtcagggtcggggcaggtggaagtgtgatcccgtcgaccaatgccaggattcagagactgggacgttttatcaaattggagattcatgggagaagtatgtgcatggtgtcagataccagtgctactgctatggccgtggcattggggagtggcattgccaacctttacagacctatccaagctcaagtggtcctgtcgaagtatttatcactgagactccgagtcagcccaactcccaccccatccagtggaatgcaccacagccatctcacatttccaagtacattctcaggtggagacctaaaaattctgtaggccgttggaaggaagctaccataccaggccacttaaactcctacaccatcaaaggcctgaagcctggtgtggtatacgagggccagctcatcagcatccagcagtacggccaccaagaagtgactcgctttgacttcaccaccaccagcaccagcacacctgtgaccagcaacaccgtgacaggagagacgactcccttttctcctcttgtggccacttctgaatctgtgaccgaaatcacagccagtagctttgtggtctcctgggtctcagcttccgacaccgtgtcgggattccgggtggaatatgagctgagtgaggagggagatgagccacagtacctggatcttccaagcacagccacttctgtgaacatccctgacctgcttcctggccgaaaatacattgtaaatgtctatcagatatctgaggatggggagcagagtttgatcctgtctacttcacaaacaacagcgcctgatgcccctcctgacccgactgtggaccaagttgatgacacctcaattgttgttcgctggagcagaccccaggctcccatcacagggtacagaatagtctattcgccatcagtagaaggtagcagcacagaactcaaccttcctgaaactgcaaactccgtcaccctcagtgacttgcaacctggtgttcagtataacatcactatctatgctgtggaagaaaatcaagaaagtacacctgttgtcattcaacaagaaaccactggcaccccacgctcagatacagtgccctctcccagggacctgcagtttgtggaagtgacagacgtgaaggtcaccatcatgtggacaccgcctgagagtgcagtgaccggctaccgtgtggatgtgatccccgtcaacctgcctggcgagcacgggcagaggctgcccatcagcaggaacacctttgcagaagtcaccgggctgtcccctggggtcacctattacttcaaagtctttgcagtgagccatgggagggagagcaagcctctgactgctcaacagacaaccaaactggatgctcccactaacctccagtttgtcaatgaaactgattctactgtcctggtgagatggactccacctcgggcccagataacaggataccgactgaccgtgggccttacccgaagaggacagcccaggcagtacaatgtgggtccctctgtctccaagtacccactgaggaatctgcagcctgcatctgagtacaccgtatccctcgtggccataaagggcaaccaagagagccccaaagccactggagtctttaccacactgcagcctgggagctctattccaccttacaacaccgaggtgactgagaccaccattgtgatcacatggacgcctgctccaagaattggttttaagctgggtgtacgaccaagccagggaggagaggcaccacgagaagtgacttcagactcaggaagcatcgttgtgtccggcttgactccaggagtagaatacgtctacaccatccaagtcctgagagatggacaggaaagagatgcgccaattgtaaacaaagtggtgacaccattgtctccaccaacaaacttgcatctggaggcaaaccctgacactggagtgctcacagtctcctgggagaggagcaccaccccagacattactggttatagaattaccacaacccctacaaacggccagcagggaaattctttggaagaagtggtccatgctgatcagagctcctgcacttttgataacctgagtcccggcctggagtacaatgtcagtgtttacactgtcaaggatgacaaggaaagtgtccctatctctgataccatcatcccagctgttcctcctcccactgacctgcgattcaccaacattggtccagacaccatgcgtgtcacctgggctccacccccatccattgatttaaccaacttcctggtgcgttactcacctgtgaaaaatgaggaagatgttgcagagttgtcaatttctccttcagacaatgcagtggtcttaacaaatctcctgcctggtacagaatatgtagtgagtgtctccagtgtctacgaacaacatgagagcacacctcttagaggaagacagaaaacaggtcttgattccccaactggcattgacttttctgatattactgccaactcttttactgtgcactggattgctcctcgagccaccatcactggctacaggatccgccatcatcccgagcacttcagtgggagacctcgagaagatcgggtgccccactctcggaattccatcaccctcaccaacctcactccaggcacagagtatgtggtcagcatcgttgctcttaatggcagagaggaaagtcccttattgattggccaacaatcaacagtttctgatgttccgagggacctggaagttgttgctgcgacccccaccagcctactgatcagctgggatgctcctgctgtcacagtgagatattacaggatcacttacggagagacaggaggaaatagccctgtccaggagttcactgtgcctgggagcaagtctacagctaccatcagcggccttaaacctggagttgattataccatcactgtgtatgctgtcactggccgtggagacagccccgcaagcagcaagccaatttccattaattaccgaacagaaattgacaaaccatcccagatgcaagtgaccgatgttcaggacaacagcattagtgtcaagtggctgccttcaagttcccctgttactggttacagagtaaccaccactcccaaaaatggaccaggaccaacaaaaactaaaactgcaggtccagatcaaacagaaatgactattgaaggcttgcagcccacagtggagtatgtggttagtgtctatgctcagaatccaagcggagagagtcagcctctggttcagactgcagtaaccaacattgatcgccctaaaggactggcattcactgatgtggatgtcgattccatcaaaattgcttgggaaagcccacaggggcaagtttccaggtacagggtgacctactcgagccctgaggatggaatccatgagctattccctgcacctgatggtgaagaagacactgcagagctgcaaggcctcagaccgggttctgagtacacagtcagtgtggttgccttgcacgatgatatggagagccagcccctgattggaacccagtccacagctattcctgcaccaactgacctgaagttcactcaggtcacacccacaagcctgagcgcccagtggacaccacccaatgttcagctcactggatatcgagtgcgggtgacccccaaggagaagaccggaccaatgaaagaaatcaaccttgctcctgacagctcatccgtggttgtatcaggacttatggtggccaccaaatatgaagtgagtgtctatgctcttaaggacactttgacaagcagaccagctcagggagttgtcaccactctggagaatgtcagcccaccaagaagggctcgtgtgacagatgctactgagaccaccatcaccattagctggagaaccaagactgagacgatcactggcttccaagttgatgccgttccagccaatggccagactccaatccagagaaccatcaagccagatgtcagaagctacaccatcacaggtttacaaccaggcactgactacaagatctacctgtacaccttgaatgacaatgctcggagctcccctgtggtcatcgacgcctccactgccattgatgcaccatccaacctgcgtttcctggccaccacacccaattccttgctggtatcatggcagccgccacgtgccaggattaccggctacatcatcaagtatgagaagcctgggtctcctcccagagaagtggtccctcggccccgccctggtgtcacagaggctactattactggcctggaaccgggaaccgaatatacaatttatgtcattgccctgaagaataatcagaagagcgagcccctgattggaaggaaaaagacagttcaaaagacccctttcgtcacccaccctgggtatgacactggaaatggtattcagcttcctggcacttctggtcagcaacccagtgttgggcaacaaatgatctttgaggaacatggttttaggcggaccacaccgcccacaacggccacccccataaggcataggccaagaccatacccgccgaatgtaggacaagaagctctctctcagacaaccatctcatgggccccattccaggacacttctgagtacatcatttcatgtcatcctgttggcactgatgaagaacccttacagttcagggttcctggaacttctaccagtgccactctgacaggcctcaccagaggtgccacctacaacatcatagtggaggcactgaaagaccagcagaggcataaggttcgggaagaggttgttaccgtgggcaactctgtcaacgaaggcttgaaccaacctacggatgactcgtgctttgacccctacacagtttcccattatgccgttggagatgagtgggaacgaatgtctgaatcaggctttaaactgttgtgccagtgcttaggctttggaagtggtcatttcagatgtgattcatctagatggtgccatgacaatggtgtgaactacaagattggagagaagtgggaccgtcagggagaaaatggccagatgatgagctgcacatgtcttgggaacggaaaaggagaattcaagtgtgaccctcatgaggcaacgtgttatgatgatgggaagacataccacgtaggagaacagtggcagaaggaatatctcggtgccatttgctcctgcacatgctttggaggccagcggggctggcgctgtgacaactgccgcagacctgggggtgaacccagtcccgaaggcactactggccagtcctacaaccagtattctcagagataccatcagagaacaaacactaatgttaattgcccaattgagtgcttcatgcctttagatgtacaggctgacagagaagattcccgagagtaaatcatctttccaatccagaggaacaagcatgtctctctgccaagatccatctaaactggagtgatgttagcagacccagcttagagttcttctttctttcttaagccctttgctctggaggaagttctccagcttcagctcaactcacagcttctccaagcatcaccctgggagtttcctgagggttttctcataaatgagggctgcacattgcctgttctgcttcgaagtattcaataccgctcagtattttaaatgaagtgattctaagatttggtttgggatcaataggaaagcatatgcagccaaccaagatgcaaatgttttgaaatgatatgaccaaaattttaagtaggaaagtcacccaaacacttctgctttcacttaagtgtctggcccgcaatactgtaggaacaagcatgatcttgttactgtgatattttaaatatccacagtactcactttttccaaatgatcctagtaattgcctagaaatatctttctcttacctgttatttatcaatttttcccagtatttttatacggaaaaaattgtattgaaaacacttagtatgcagttgataagaggaatttggtataattatggtgggtgattattttttatactgtatgtgccaaagctttactactgtggaaagacaactgttttaataaaagatttacattccacaacttgaagttcatctatttgatataagacaccttcgggggaaataattcctgtgaatattctttttcaattcagcaaacatttgaaaatctatgatgtgcaagtctaattgttgatttcagtacaagattttctaaatcagttgctacaaaaactgattggtttttgtcacttcatctcttcactaatggagatagctttacactttctgctttaatagatttaagtggaccccaatatttattaaaattgctagtttaccgttcagaagtataatagaaataatctttagttgctcttttctaaccattgtaattcttcccttcttccctccacctttccttcattgaataaacctctgttcaaagagattgcctgcaagggaaataaaaatgactaagatattaaaaaaaaaaaaaaaaaa

SEQ ID NO: 375 - protein, 2330 aa, Homo sapiens
MLRGPGPGLLLLAVQCLGTAVPSTGASKSKRQAQQMVQPQSPVAVSQSKPGCYDNGKHYQINQQWERTYLGNALVCTCYGGSRGFNCESKPEAEETCFDKYTGNTYRVGDTYERPKDSMIWDCTCIGAGRGRISCTIANRCHEGGQSYKIGDTWRRPHETGGYMLECVCLGNGKGEWTCKPIAEKCFDHAAGTSYVVGETWEKPYQGWMMVDCTCLGEGSGRITCTSRNRCNDQDTRTSYRIGDTWSKKDNRGNLLQCICTGNGRGEWKCERHTSVQTTSSGSGPFTDVRAAVYQPQPHPQPPPYGHCVTDSGVVYSVGMQWLKTQGNKQMLCTCLGNGVSCQETAVTQTYGGNSNGEPCVLPFTYNGRTFYSCTTEGRQDGHLWCSTTSNYEQDQKYSFCTDHTVLVQTRGGNSNGALCHFPFLYNNHNYTDCTSEGRRDNMKWCGTTQNYDADQKFGFCPMAAHEEICTTNEGVMYRIGDQWDKQHDMGHMMRCTCVGNGRGEWTCIAYSQLRDQCIVDDITYNVNDTFHKRHEEGHMLNCTCFGQGRGRWKCDPVDQCQDSETGTFYQIGDSWEKYVHGVRYQCYCYGRGIGEWHCQPLQTYPSSSGPVEVFITETPSQPNSHPIQWNAPQPSHISKYILRWRPKNSVGRWKEATIPGHLNSYTIKGLKPGVVYEGQLISIQQYGHQEVTRFDFTTTSTSTPVTSNTVTGETTPFSPLVATSESVTEITASSFVVSWVSASDTVSGFRVEYELSEEGDEPQYLDLPSTATSVNIPDLLPGRKYIVNVYQISEDGEQSLILSTSQTTAPDAPPDPTVDQVDDTSIVVRWSRPQAPITGYRIVYSPSVEGSSTELNLPETANSVTLSDLQPGVQYNITIYAVEENQESTPVVIQQETTGTPRSDTVPSPRDLQFVEVTDVKVTIMWTPPESAVTGYRVDVIPVNLPGEHGQRLPISRNTFAEVTGLSPGVTYYFKVFAVSHGRESKPLTAQQTTKLDAPTNLQFVNETDSTVLVRWTPPRAQITGYRLTVGLTRRGQPRQYNVGPSVSKYPLRNLQPASEYTVSLVAIKGNQESPKATGVFTTLQPGSSIPPYNTEVTETTIVITWTPAPRIGFKLGVRPSQGGEAPREVTSDSGSIVVSGLTPGVEYVYTIQVLRDGQERDAPIVNKVVTPLSPPTNLHLEANPDTGVLTVSWERSTTPDITGYRITTTPTNGQQGNSLEEVVHADQSSCTFDNLSPGLEYNVSVYTVKDDKESVPISDTIIPAVPPPTDLRFTNIGPDTMRVTWAPPPSIDLTNFLVRYSPVKNEEDVAELSISPSDNAVVLTNLLPGTEYVVSVSSVYEQHESTPLRGRQKTGLDSPTGIDFSDITANSFTVHWIAPRATITGYRIRHHPEHFSGRPREDRVPHSRNSITLTNLTPGTEYVVSIVALNGREESPLLIGQQSTVSDVPRDLEVVAATPTSLLISWDAPAVTVRYYRITYGETGGNSPVQEFTVPGSKSTATISGLKPGVDYTITVYAVTGRGDSPASSKPISINYRTEIDKPSQMQVTDVQDNSISVKWLPSSSPVTGYRVTTTPKNGPGPTKTKTAGPDQTEMTIEGLQPTVEYVVSVYAQNPSGESQPLVQTAVTNIDRPKGLAFTDVDVDSIKIAWESPQGQVSRYRVTYSSPEDGIHELFPAPDGEEDTAELQGLRPGSEYTVSVVALHDDMESQPLIGTQSTAIPAPTDLKFTQVTPTSLSAQWTPPNVQLTGYRVRVTPKEKTGPMKEINLAPDSSSVVVSGLMVATKYEVSVYALKDTLTSRPAQGVVTTLENVSPPRRARVTDATETTITISWRTKTETITGFQVDAVPANGQTPIQRTIKPDVRSYTITGLQPGTDYKIYLYTLNDNARSSPVVIDASTAIDAPSNLRFLATTPNSLLVSWQPPRARITGYIIKYEKPGSPPREVVPRPRPGVTEATITGLEPGTEYTIYVIALKNNQKSEPLIGRKKTVQKTPFVTHPGYDTGNGIQLPGTSGQQPSVGQQMIFEEHGFRRTTPPTTATPIRHRPRPYPPNVGQEALSQTTISWAPFQDTSEYIISCHPVGTDEEPLQFRVPGTSTSATLTGLTRGATYNIIVEALKDQQRHKVREEVVTVGNSVNEGLNQPTDDSCFDPYTVSHYAVGDEWERMSESGFKLLCQCLGFGSGHFRCDSSRWCHDNGVNYKIGEKWDRQGENGQMMSCTCLGNGKGEFKCDPHEATCYDDGKTYHVGEQWQKEYLGAICSCTCFGGQRGWRCDNCRRPGGEPSPEGTTGQSYNQYSQRYHQRTNTNVNCPIECFMPLDVQADREDSRE

SEQ ID NO: 376 - DNA, 498 bp, Homo sapiens; identical to SEQ ID NO: 202

SEQ ID NO: 377 - protein, 100 aa, Homo sapiens; identical to SEQ ID NO: 203

SEQ ID NO: 378 - DNA, 570 bp, Homo sapiens
atggccttgccctttgttttactgatggccctggtggtgctcaactgcaagtcaatctgttctctgggctgtgatctgcctcagacccacagcctgagtaacaggaggactttgatgataatggcacaaatgggaagaatctctcctttctcctgcctgaaggacagacatgactttggatttcctcaggaggagtttgatggcaaccagttccagaaggctcaagccatctctgtcctccatgagatgatccagcagaccttcaatctcttcagcacaaaggactcatctgctacttgggatgagacacttctagacaaattctacactgaactttaccagcagctgaatgacctggaagcctgtatgatgcaggaggttggagtggaagacactcctctgatgaatgtggactctatcctgactgtgagaaaatactttcaaagaatcaccctctatctgacagagaagaaatacagcccttgtgcatgggaggttgtcagagcagaaatcatgagatccttctctttatcagcaaacttgcaagaaagattaaggaggaaggaatga

SEQ ID NO: 379 - protein, 189 aa, Homo sapiens
MALPFVLLMALVVLNCKSICSLGCDLPQTHSLSNRRTLMIMAQMGRISPFSCLKDRHDFGFPQEEFDGNQFQKAQAISVLHEMIQQTFNLFSTKDSSATWDETLLDKFYTELYQQLNDLEACMMQEVGVEDTPLMNVDSILTVRKYFQRITLYLTEKKYSPCAWEVVRAEIMRSFSLSANLQERLRRKE

SEQ ID NO: 380 - DNA, 653 bp, Homo sapiens
agagaacctagagcccaaggttcagagtcacccatctcagcaagcccagaagcatctgcaatatctatgatggcctcgccctttgctttactgatggccctggtggtgctcagctgcaagtcaagctgctctctgggctgtgatctccctgagacccacagcctggataacaggaggaccttgatgctcctggcacaaatgagcagaatctctccttcctcctgtctgatggacagacatgactttggatttccccaggaggagtttgatggcaaccagttccagaaggctccagccatctctgtcctccatgagctgatccagcagatcttcaacctctttaccacaaaagattcatctgctgcttgggatgaggacctcctagacaaattctgcaccgaactctaccagcagctgaatgacttggaagcctgtgtgatgcaggaggagagggtgggagaaactcccctgatgaatgcggactccatcttggctgtgaagaaatacttccgaagaatcactctctatctgacagagaagaaatacagcccttgtgcctgggaggttgtcagagcagaaatcatgagatccctctctttatcaacaaacttgcaagaaagattaaggaggaaggaataacacctggtccaaca

SEQ ID NO: 381 - protein, 189 aa, Homo sapiens
MASPFALLMALVVLSCKSSCSLGCDLPETHSLDNRRTLMLLAQMSRISPSSCLMDRHDFGFPQEEFDGNQFQKAPAISVLHELIQQIFNLFTTKDSSAAWDEDLLDKFCTELYQQLNDLEACVMQEERVGETPLMNADSILAVKKYFRRITLYLTEKKYSPCAWEVVRAEIMRSLSLSTNLQERLRRKE

1. A method of detecting lineage-specific cells in a biological sample, comprising the step of identifying lineage-specific mRNA in said sample, thereby detecting lineage-specific cells in said sample.

2. A method of detecting lineage-specific cells in a biological sample comprising the step of identifying at least one allelic variant in lineage-specific mRNA in said sample, thereby detecting lineage-specific cells in said sample.

3. A method of detecting lineage-specific cells in a biological sample comprising the step of identifying at least one single nucleotide polymorphism in lineage-specific mRNA in said sample, thereby detecting lineage-specific cells in said sample.

4. The method of claim 2, wherein said at least one allelic variant is in a gene selected from the genes listed in Tables 4, 6, 7, and 8.

5. The method of claim 3, wherein said at least one single nucleotide polymorphism is in a gene selected from the genes listed in Tables 4, 6, 7, and 8.

6. The method of claim 1, wherein said lineage-specific cells are hematopoietic cells.

7. The method claim 6, wherein said hematopoietic cells are erythroid cells.

8. The method of claim 6, wherein said hematopoietic cells are lymphoid cells.

9. The method of claim 6, wherein said hematopoietic cells are myeloid cells.

10. The method of claim 3, wherein said single nucleotide polymorphism is selected from the group listed in Table 9.

11. The method of claim 10, wherein said single nucleotide polymorphism is in a β-globin gene.

12. A method of quantifying donor and recipient lineage-specific cells in a subject following progenitor cell transfer comprising the steps of:
(a) obtaining a biological sample from said subject following progenitor cell transfer; and
(b) identifying and quantifying the presence of one or more donor-derived allelic variants and the presence of one or more recipient-derived allelic variants,
thereby quantifying donor and recipient lineage-specific cells in a subject.

13. A method of detecting lineage-specific chimerism of a subject following progenitor cell transfer comprising the steps of:
(a) obtaining a biological sample from said subject following progenitor cell transfer; and
(b) identifying and quantifying the presence of one or more donor-derived lineage-specific allelic variants and the presence of one or more recipient-derived lineage-specific allelic variants,
thereby detecting lineage-specific chimerism of a subject following progenitor cell transfer.

14. The method of claim 12, wherein said allelic variants are contained within a lineage-specific gene.

15. The method claim 14, wherein said lineage-specific gene is selected from the group of genes listed in Tables 4, 5, 6, and 7.

16. The method of claim 12, wherein said allelic variants are single nucleotide polymorphisms (SNPs).

17. The method of claim 16, wherein said single nucleotide polymorphisms (SNPs) are selected from the group consisting of those SNPs listed in Table 9.

18. The method of claim 12, wherein said lineage-specific allelic variants are expressed by a lineage-specific cell selected from the group consisting of erythroid, lymphoid, or myeloid cells.

19. The method of claim 12, wherein said subject is suffering from a disease or disorder.

20. The method of claim 19, wherein said disease or disorder is associated with reduced levels of β-globin mRNA.

21. The method of claim 19, wherein said disease or disorder is selected from the group consisting of: hemoglobinopathies, hemolytic anemia, hereditary elliptocytosis, hereditary stomatocytosis, Chronic Granulomatous Disease, Chediak-Higashi syndrome, myelodysplasia, acute erythroleukemia, Kostmann's syndrome, infant malignant osteopetrosis, severe combined immunodeficiency, Wiskott-Aldrich syndrome, aplastic anemia, Blackfan Diamond anemia, Gaucher's disease, Hurler's syndrome, Hunter's syndrome, infantile metachromatic leukodystrophy, autoimmune disorders, osteogenesis imperfecta, myocardial injury syndromes, Cystic Fibrosis, hemophilia, Gaucher's disease, cancers associated with oncogenes, diabetes mellitus, organ failure or injury, and cognitive and neurodegenerative disorders.

22. The method of claim 12, wherein said progenitor cell is a stem cell.

23. The method of claim 12, wherein said progenitor cell is a transgenic cell.

24. The method of claim 1, wherein said biological sample is blood.

25. The method of claim 1, wherein said biological sample is bone marrow.

26. The method of claim 1, wherein said lineage-specific mRNA is identified by sequencing.

27. The method of claim 26, wherein said sequencing is pyrosequencing.

28. The method of claim 12, wherein said allelic variants are identified by sequencing.

29. The method of claim 28, wherein said sequencing is pyrosequencing.

30. The method of claim 1, wherein said lineage-specific mRNA is identified by an array-based method.

31. The method of claim 12, wherein said allelic variants are identified by an array-based method.

32. The method of claim 12, wherein said subject is a mammal.

33. The method of claim 32, wherein said mammal is a human.

34. A method of detecting lineage-specific cells in a biological sample, comprising the step of:
(a) isolating mRNA from said biological sample;
(b) reverse transcribing cDNA from said mRNA;
(c) amplifying said cDNA; and
(d) identifying lineage-specific cDNA in said sample.

35. A method of detecting lineage-specific cells in a biological sample comprising the steps of:
(a) ascertaining at least one lineage-specific allelic variant in a target sequence;
(b) isolating mRNA from said biological sample;
(c) reverse transcribing cDNA from said mRNA;
(d) amplifying said at least one allelic variant from said cDNA; and
(e) identifying the at least one lineage-specific allelic variant in step (a) in said sample, thereby detecting lineage-specific cells in said sample.

36. The method of claim 35, wherein said amplification of said cDNA comprises the amplification two or more allelic variants.

37. The method of claim 35, wherein said at least one allelic variant is in a gene selected from the genes listed in Tables 4, 6, 7, and 8.

38. The method of claim 34, wherein said amplification of cDNA amplifies a polymorphic region of a gene or fragment thereof selected from the genes listed in Tables 4, 6, 7, and 8.

39. The method of claim 34, wherein said amplification of cDNA amplifies a β-globin gene or fragment thereof.

40. The method of claim 39, wherein said amplification of the β-globin gene or fragment thereof utilizes the primers set forth as SEQ ID No.: 3 and SEQ ID NO: 5.

41. The method of claim 39, wherein said amplification of the β-globin gene or fragment thereof utilizes the primers set forth as SEQ ID No.: 6 and SEQ ID NO: 8.

42.-54. (canceled)

55. The method of claim 21, wherein said cancers associated with oncogenes are selected from the group, breast, prostate, and colon.

56. The method of claim 21, wherein said organ failure or injury is selected from the group cardiac, brain, lung, liver, renal, prostate and pancreas failure or injury.

57. A method for determining the clinical outcome of a progenitor cell transfer in a subject comprising obtaining a biological sample from said subject and identifying lineage-specific mRNA in said biological sample, wherein a substantial amount of donor-derived lineage-specific allelic variants selected from the group in Table 7 is an indication of poor clinical outcome and a substantial amount of recipient-derived lineage-specific allelic variants selected from the group in Table 7 is an indication of favorable clinical outcome, thereby determining the clinical outcome of a progenitor cell transfer in a subject.

58. A method for determining immune reconstitution in a subject following progenitor cell transfer comprising the steps of obtaining a biological sample from said subject and identifying the identify of at least one lineage-specific allelic variant in said biological sample, to thereby determine immune reconstitution in a subject.
